(19) United States
(12) Patent Application Publication
(10) Pub. No.: US 2011/0252508 A1
(43) Pub. Date: Oct. 13, 2011

(54) Plants Having Enhanced Yield-Related Traits and/or Abiotic Stress Tolerance and a Method for Making the Same

(75) Inventors: Ana Isabel Sanz Molinero, Gentbrugge (BE); Valerie Frankard, Waterloo (BE); Yves Hatzfeld, Lille (FR); Christophe Reuzeau, Tocan Saint Apre (FR)

(73) Assignee: BASF Plant Science GmbH, Ludwigshafen (DE)

(21) Appl. No.: 13/140,322

(22) PCT Filed: Dec. 10, 2009
(86) PCT No.: PCT/EP09/66777

§ 371 Date: Jun. 24, 2011

Related U.S. Application Data
(60) Provisional application No. 61/138,971, filed on Dec. 19, 2008.
(60) Provisional application No. 61/138,963, filed on Dec. 19, 2008.
(60) Provisional application No. 61/138,969, filed on Dec. 19, 2008.
(60) Provisional application No. 61/144,783, filed on Jan. 15, 2009.
(60) Provisional application No. 61/144,797, filed on Jan. 15, 2009.
(60) Provisional application No. 61/144,769, filed on Jan. 15, 2009.
(60) Provisional application No. 61/144,763, filed on Jan. 15, 2009.

(30) Foreign Application Priority Data
Dec. 17, 2008 (EP) 08172039.3
Dec. 17, 2008 (EP) 08172041.9
Dec. 17, 2008 (EP) 08172042.7
Dec. 23, 2008 (EP) 08172835.4
Dec. 23, 2008 (EP) 08172839.6
Dec. 23, 2008 (EP) 08172842.0
Dec. 23, 2008 (EP) 08172847.9

(51) Int. Cl. A01H 5/00; A01H 5/10; C12N 5/10; A01H 1/06; C12N 15/63

(52) U.S. Cl. 800/290; 800/278; 435/320.1; 800/298; 435/419; 800/320.3; 800/320.2; 800/320

(57) ABSTRACT

The present application is directed to modification of yield related traits by modulating the expression of a Cofactor Required for SP1 activation (CRSP), Myb related CAB promoter binding protein (MCB), Sirtuin 2 (SRT2) or SPX-RING. Furthermore, the application is directed to improved abiotic stress tolerance by modulating the expression of YRP2, YRP3 or YRP4.

[0001] The present invention relates generally to the field of molecular biology and concerns a method for enhancing various yield-related traits in plants by modulating expression in a plant of a nucleic acid encoding a Cofactor Required for Sp1 activation (CRSP) polypeptide, more specifically, a CRSP33-like polypeptide. The present invention also concerns plants having modulated expression of a nucleic acid encoding a CRSP33-like polypeptide, which plants have enhanced yield-related traits relative to corresponding wild type plants or other control plants. The invention also provides constructs useful in the methods of the invention.

[0002] The present invention relates generally to the field of molecular biology and concerns a method for enhancing various plant yield-related traits by modulating expression in a plant of a nucleic acid encoding an MCB (Myb-related CAB promoter-binding protein). The present invention also concerns plants having modulated expression of a nucleic acid encoding an MCB, which plants have enhanced yield-related traits relative to corresponding wild type plants or other control plants. The invention also provides constructs useful in the methods of the invention.

[0003] The present invention relates generally to the field of molecular biology and concerns a method for improving various plant growth characteristics by modulating expression in a plant of a nucleic acid encoding a SRT2 (Sirtuin 2 or Silent Information Regulator 2). The present invention also concerns plants having modulated expression of a nucleic acid encoding a SRT2, which plants have improved growth characteristics relative to corresponding wild type plants or other control plants. The invention also provides constructs useful in the methods of the invention.

[0004] The present invention relates generally to the field of molecular biology and concerns a method for enhancing abiotic stress tolerance in plants by modulating expression in a plant of a nucleic acid encoding a YRP2. The present invention also concerns plants having modulated expression of a nucleic acid encoding a YRP2, which plants have enhanced abiotic stress tolerance relative to corresponding wild type plants or other control plants. The invention also provides constructs useful in the methods of the invention.

[0005] The present invention relates generally to the field of molecular biology and concerns a method for enhancing abiotic stress tolerance in plants by modulating expression in a plant of a nucleic acid encoding a YRP3. The present invention also concerns plants having modulated expression of a nucleic acid encoding a YRP3, which plants have enhanced abiotic stress tolerance relative to corresponding wild type plants or other control plants. The invention also provides constructs useful in the methods of the invention.

[0006] The present invention relates generally to the field of molecular biology and concerns a method for enhancing abiotic stress tolerance in plants by modulating expression in a plant of a nucleic acid encoding a YRP4. The present invention also concerns plants having modulated expression of a nucleic acid encoding a YRP4, which plants have enhanced abiotic stress tolerance relative to corresponding wild type plants or other control plants. The invention also provides constructs useful in the methods of the invention.

[0007] The present invention relates generally to the field of molecular biology and concerns a method for enhancing various plant yield-related traits by modulating expression in a plant of a nucleic acid encoding an SPX-RING (SYG1, Pho81, XPR1-Zinc finger, RING-type). The present invention also concerns plants having modulated expression of a nucleic acid encoding a SPX-RING, which plants have enhanced yield-related traits relative to corresponding wild type plants or other control plants. The invention also provides constructs useful in the methods of the invention.

[0008] The ever-increasing world population and the dwindling supply of arable land available for agriculture fuels research towards increasing the efficiency of agriculture. Conventional means for crop and horticultural improvements utilise selective breeding techniques to identify plants having desirable characteristics. However, such selective breeding techniques have several drawbacks, namely that these techniques are typically labour intensive and result in plants that often contain heterogeneous genetic components that may not always result in the desirable trait being passed on from parent plants. Advances in molecular biology have allowed mankind to modify the germplasm of animals and plants. Genetic engineering of plants entails the isolation and manipulation of genetic material (typically in the form of DNA or RNA) and the subsequent introduction of that genetic material into a plant. Such technology has the capacity to deliver crops or plants having various improved economic, agronomic or horticultural traits.

[0009] A trait of particular economic interest is increased yield. Yield is normally defined as the measurable produce of economic value from a crop. This may be defined in terms of quantity and/or quality. Yield is directly dependent on several factors, for example, the number and size of the organs, plant architecture (for example, the number of branches), seed production, leaf senescence and more. Root development, nutrient uptake, stress tolerance and early vigour may also be important factors in determining yield. Optimizing the abovementioned factors may therefore contribute to increasing crop yield.

[0010] Seed yield is a particularly important trait, since the seeds of many plants are important for human and animal nutrition. Crops such as corn, rice, wheat, canola and soybean account for over half the total human caloric intake, whether through direct consumption of the seeds themselves or through consumption of meat products raised on processed seeds. They are also a source of sugars, oils and many kinds of metabolites used in industrial processes. Seeds contain an embryo (the source of new shoots and roots) and an endosperm (the source of nutrients for embryo growth during germination and during early growth of seedlings). The development of a seed involves many genes, and requires the transfer of metabolites from the roots, leaves and stems into the growing seed. The endosperm, in particular, assimilates the metabolic precursors of carbohydrates, oils and proteins and synthesizes them into storage macromolecules to fill out the grain.

[0011] Plant biomass is yield for forage crops like alfalfa, silage corn and hay. Many proxies for yield have been used in grain crops. Chief amongst these are estimates of plant size. Plant size can be measured in many ways depending on species and developmental stage, but include total plant dry weight, above-ground dry weight, above-ground fresh weight, leaf area, stem volume, plant height, rosette diameter, leaf length, root length, root mass, tiller number and leaf number. Many species maintain a conservative ratio between the size of different parts of the plant at a given developmental stage. These allometric relationships are used to extrapolate from one of these measures of size to another (e.g. Tittonell et al 2005 Agric Ecosys & Environ 105: 213). Plant size at an early developmental stage will typically correlate with plant size later in development. A larger plant with a greater leaf area can typically absorb more light and carbon dioxide than a smaller plant and therefore will likely gain a greater weight during the same period (Fasoula & Tollenaar 2005 Maydica 50:39). This is in addition to the potential continuation of the micro-environmental or genetic advantage that the plant had to achieve the larger size initially. There is a strong genetic component to plant size and growth rate (e.g. ter Steege et al 2005 Plant Physiology 139:1078), and so for a range of diverse genotypes plant size under one environmental condition is likely to correlate with size under another (Hittalmani et al 2003 Theoretical Applied Genetics 107:679). In this way a standard environment is used as a proxy for the diverse and dynamic environments encountered at different locations and times by crops in the field.

[0012] Another important trait for many crops is early vigour. Improving early vigour is an important objective of modern rice breeding programs in both temperate and tropical rice cultivars. Long roots are important for proper soil anchorage in water-seeded rice. Where rice is sown directly into flooded fields, and where plants must emerge rapidly through water, longer shoots are associated with vigour. Where drill-seeding is practiced, longer mesocotyls and coleoptiles are important for good seedling emergence. The ability to engineer early vigour into plants would be of great importance in agriculture. For example, poor early vigour has been a limitation to the introduction of maize (Zea mays L.) hybrids based on Corn Belt germplasm in the European Atlantic.

[0013] Harvest index, the ratio of seed yield to aboveground dry weight, is relatively stable under many environmental conditions and so a robust correlation between plant size and grain yield can often be obtained (e.g. Rebetzke et al 2002 Crop Science 42:739). These processes are intrinsically linked because the majority of grain biomass is dependent on current or stored photosynthetic productivity by the leaves and stem of the plant (Gardener et al 1985 Physiology of Crop Plants. Iowa State University Press, pp 68-73). Therefore, selecting for plant size, even at early stages of development, has been used as an indicator for future potential yield (e.g. Tittonell et al 2005 Agric Ecosys & Environ 105: 213). When testing for the impact of genetic differences on stress tolerance, the ability to standardize soil properties, temperature, water and nutrient availability and light intensity is an intrinsic advantage of greenhouse or plant growth chamber environments compared to the field. However, artificial limitations on yield due to poor pollination due to the absence of wind or insects, or insufficient space for mature root or canopy growth, can restrict the use of these controlled environments for testing yield differences. Therefore, measurements of plant size in early development, under standardized conditions in a growth chamber or greenhouse, are standard practices to provide indication of potential genetic yield advantages.

[0014] A further important trait is that of improved abiotic stress tolerance. Abiotic stress is a primary cause of crop loss worldwide, reducing average yields for most major crop plants by more than 50% (Wang et al., Planta (2003) 218: 1-14). Abiotic stresses may be caused by drought, salinity, extremes of temperature, chemical toxicity and oxidative stress. The ability to improve plant tolerance to abiotic stress would be of great economic advantage to farmers worldwide and would allow for the cultivation of crops during adverse conditions and in territories where cultivation of crops may not otherwise be possible.

[0015] It has now been found that tolerance to various abiotic stresses may be enhanced in plants by modulating expression in a plant of a nucleic acid encoding a YRP2 polypeptide, or a YRP3 polypeptide, or a YRP3 polypeptide.

[0016] Crop yield may therefore be increased by optimising one of the above-mentioned factors.

[0017] Depending on the end use, the modification of certain yield traits may be favoured over others. For example for applications such as forage or wood production, or bio-fuel resource, an increase in the vegetative parts of a plant may be desirable, and for applications such as flour, starch or oil production, an increase in seed parameters may be particularly desirable. Even amongst the seed parameters, some may be favoured over others, depending on the application. Various mechanisms may contribute to increasing seed yield, whether that is in the form of increased seed size or increased seed number.

[0018] One approach to increasing yield (seed yield and/or biomass) in plants may be through modification of the inherent growth mechanisms of a plant, such as the cell cycle or various signalling pathways involved in plant growth or in defense mechanisms.

[0019] It has now been found that various yield-related traits may be improved in plants by modulating expression in a plant of a nucleic acid encoding a CRSP33-like polypeptide in a plant.

[0020] It has now been found that various yield-related traits may be improved in plants by modulating expression in a plant of a nucleic acid encoding an MCB (Myb-related CAB promoter-binding protein) in a plant.

[0021] It has now been found that various growth characteristics may be improved in plants by modulating expression in a plant of a nucleic acid encoding a SRT2 (Sirtuin 2 or Silent Information Regulator 2) in a plant.

[0022] It has now been found that various yield-related traits may be improved in plants by modulating expression in a plant of a nucleic acid encoding a SPX-RING (SYG1, Pho81, XPR1-Zinc finger, RING-type) in a plant.

### BACKGROUND

### 1. Cofactor Required for Sp1 Activation (CRSP) Polypeptides

[0023] Activation of gene transcription in metazoans is a multistep process that is triggered by factors that recognize transcriptional enhancer sites in DNA. These factors work with co-activators to direct transcriptional initiation by the RNA polymerase II apparatus. One class of co-activator, the TAF(II) subunits of transcription factor TFIID, can serve as targets of activators and as proteins that recognize core promoter sequences necessary for transcription initiation. Transcriptional activation by enhancer-binding factors such as Sp1 reportedly requires TFIID. Ryu et al. (Nature. 1999 Feb. 4; 397(6718):446-50) report that the transcriptional cofactor complex CRSP is required for activity of the enhancer-binding protein Sp1. They describe human factor, CRSP, as being required together with the TAF(II)s for transcriptional activation by Sp1. Further reported is that purification of CRSP identifies a complex of approximate relative molecular mass 700,000 (M(r) approximately 700K) that contains nine subunits with M(r) values ranging from 33K to 200K. Cloning of genes encoding CRSP subunits revealed that CRSP33 is a homologue of the yeast mediator subunit Med7.

### 2. Myb-Related CAB Promoter-Binding (MCB) Polypeptides

[0024] MYB proteins are a superfamily of transcription factors that play regulatory roles in developmental processes and defense responses in plants. In Arabidopsis thaliana at least 198 genes have been reported (YAnhui et al. Plant Molecular Biology (2006) 60:107-124). The Arabidopsis MYB transcription factors have been classified in 4 groups: 1) R2R3-MYB (126 transcription factors), 2) R1R2R3-MYB (5 members), 3) MYB-related (64 members) and 4) atypical MYB genes (3 members). Homologus genes for the groups are found in other plant species.

[0025] Within the class 3) MYB-related a specific subgroup has been reported to be involved in the regulation of the expression of plant genes of the CAB (LHCP) gene family encoding the lightharvesting chlorophyll a/b binding proteins of photosystem II (Churin et al. Plant Molecular Biology 52: 447-462, 2003).

### 3. Sirtuin 2 or Silent Information Regulator 2 (SRT2) Polypeptides

[0026] Histone acetyltransferases (HATs) and histone deacetylases (HDACs) are enzymes required to perform histone acetylation and deacetylation, respectively, acting on the E-amino group of lysine residues located near the amino-termini of core histone proteins. Hypoacetylation mediated by HDACs has an opposite effect on the chromatin, enabling the histones to bind more tightly to the negatively-charged DNA. As a result, hypoacetylation is associated with the repression of gene expression.

[0027] The HDACs can be grouped into three types (Hollender and Liu 2008, J Integr Plant Biol. 2008; 50(7):875-85). The type III (sirtuin) HDACs are based on their sequence homology to the yeast silent information regulator 2 (Sir2) protein.

[0028] The Silent information regulator 2 (Sir2) proteins, or sirtuins are protein deacetylases that depend on nicotine adenine dinucleotide (NAD). They are found in many subcellular locations, including the nucleus, cytoplasm and mitochondria. Eukaryotic forms play in important role in the regulation of transcriptional repression. Moreover, they are involved in microtubule organisation and DNA damage repair processes. Sir2p of Saccharomyces cerevisiae is one of several factors critical for silencing at least three loci. Among them, it is unique because it silences the rDNA as well as the mating type loci and telomeres. Sir2p interacts in a complex with itself and with Sir3p and Sir4p, two proteins that are able to interact with nucleosomes. In addition Sir2p also interacts with ubiquitination factors and/or complexes. Sir2p is part of a multigene family in yeast, the homologues being HST1, HST2, HST3 and HST4. Highly conserved structural homologues also occur in other organisms ranging from bacteria to man and plants. Proteins of this family have been proposed to play a role in silencing, chromosome stability and ageing. Homologues of Sir2 share a core domain including the GAG and NID motifs and a putative C4 Zinc finger. The regions containing these three conserved motifs are individually essential for Sir2 silencing function, as are the four cysteins. In addition, the conserved residues HG next to the putative Zn finger have been shown to be essential for the ADP ribosyltransferase activity. Sir2-like enzymes catalyze a reaction in which the cleavage of NAD(+) and histone and/or protein deacetylation are coupled to the formation of O-acetyl-ADP-ribose, a novel metabolite. The dependence of the reaction on both NAD(+) and the generation of this potential second messenger offers new clues to understanding the function and regulation of nuclear, cytoplasmic and mitochondrial Sir2-like enzymes.

[0029] The sirtuins represent a unique group of NAD-dependent HDACs, which, unlike the Rpd3 and HD-tuin types, are not inhibited by trichostatin A (TSA) or sodium butyrate. The sirtuins in all organisms are divided into five classes based on sequence motifs within their highly conserved Sir2 domain. Arabidopsis has two sirtuin proteins, SRT1 and SRT2, belonging to classes IV and II, respectively (Hollender and Liu 2008).

### 4. SPX-RING (SYG1, Pho81, XPR1-Zinc Finger, RING-type) Polypeptides

[0030] The protein domain, SPX, is named after SYG1/Pho81/XPR1 proteins. This 180 residue length domain is found at the amino terminus of a variety of proteins. In the yeast protein SYG1, the N-terminus directly binds to the G-protein beta subunit and inhibits transduction of the mating pheromone signal suggesting that all the members of this family are involved in G-protein associated signal transduction (Spain et al. J Biol Chem 1995; 270:25435-25444).

[0031] The N-termini of several proteins involved in the regulation of phosphate transport, including the putative phosphate level sensors PHO81 from Saccharomyces cerevisiae and NUC-2 from Neurospora crassa, are also members of this family (Lee et al. Mol Microbiol 2000; 38:411-422).

[0032] Several members of this family are the XPR1 proteins: the xenotropic and polytropic retrovirus receptor confers susceptibility to infection with Murine leukemia virus (MLV). The similarity between SYG1, phosphate regulators and XPR1 sequences has been previously noted, as has the additional similarity to several predicted proteins, of unknown function, from Drosophila melanogaster, Arabidopsis thaliana, Caenorhabditis elegans, Schizosaccharomyces pombe, and Saccharomyces cerevisiae. In addition, given the similarities between XPR1 and SYG1 and phosphate regulatory proteins, it has been proposed that XPR1 might be involved in G-protein associated signal transduction and may itself function as a phosphate sensor Battini et al. Proc Natl Acad Sci USA 1999; 96:1385-1390).

[0033] The C3HC4 type zinc-finger (Zf-C3HC4 RING-type finger) is a cysteine-rich domain of 40 to 60 residues that coordinates two zinc ions, and has the consensus sequence: C—X2-C—X(9-39)-C—X(1-3)-H—X(2-3)-C—X2-C—X(4-48)-C—X2-C where X is any amino acid (Lorick et al. Proc Natl Acad Sci USA 1999; 96:11364-11369). Many proteins containing a RING finger play a key role in the ubiquitination pathway (Borden K L, Freemont P S, Curr Opin Struct Biol 1996; 6:395-401). The RING-finger is a specialised type of Zn-finger probably involved in mediating protein-protein interactions. There are two different variants, the C3HC4-type and a C3H2C3-type, which are clearly related despite the different cysteine/histidine pattern. The latter type is sometimes referred to as ‘RING-H2 finger’. The RING domain is a protein interaction domain that has been implicated in a range of diverse biological processes. E3 ubiquitin-protein ligase activity is intrinsic to the RING domain of c-Cbl and is likely to be a general function of this domain. E3 ubiquitin-protein ligases determine the substrate specificity for ubiquitylation and have been classified into HECT and RING-finger families. More recently, however, U-box proteins, which contain a domain (the U box) of about 70 amino acids that is conserved from yeast to humans, have been identified as a new type of E3 (Hatakeyama S, Nakayama K I. J Biochem. 2003 July; 134(1):1-8). Various RING fingers also exhibit binding to E2 ubiquitin-conjugating enzymes (Ubc's).

[0034] Several 3D-structures for RING-fingers are known (Borden K L, Freemont P S s1996). The 3D structure of the zinc ligation system is unique to the RING domain and is referred to as the ‘cross-brace’ motif. Metal ligand pairs one and three co-ordinate to bind one zinc ion, whilst pairs two and four bind the second.

[0035] Proteins comprising both an SPX and a Zf-C3HC4 RING-type finger are also found in the plant kingdom. An Arabidopsis thaliana gene encoding a protein comprising both domains, the BAH1/NLA gene, has been reportedly involved in the adaptation response of Arabidopsis thaliana to nitrogen limitation (Peng et al. Plant Mol Biol. 2007 December; 65(6):775-97).

### SUMMARY

### 1. Cofactor Required for Sp1 Activation (CRSP) Polypeptides

[0036] Surprisingly, it has now been found that modulating expression of a nucleic acid encoding a CRSP33-like polypeptide gives plants having enhanced yield-related traits, in particular increased seed yield relative to control plants.

[0037] According to one embodiment, there is provided a method for enhancing yield-related traits in a plant relative to control plants, comprising modulating expression of a nucleic acid encoding a CRSP33-like polypeptide in a plant.

### 2. Myb-Related CAB Promoter-Binding (MCB) Polypeptides

[0038] Surprisingly, it has now been found that modulating expression of a nucleic acid encoding an MCB polypeptide gives plants having enhanced yield-related traits relative to control plants.

[0039] According one embodiment, there is provided a method for yield-related traits of a plant relative to control plants, comprising modulating expression of a nucleic acid encoding an MCB polypeptide in a plant.

### 3. Sirtuin 2 or Silent Information Regulator 2 (SRT2) Polypeptides

[0040] Surprisingly, it has now been found that modulating expression of a nucleic acid encoding a SRT2 polypeptide gives plants having enhanced yield-related traits relative to control plants.

[0041] According one embodiment, there is provided a method for enhancing yield related traits of a plant relative to control plants, comprising modulating expression of a nucleic acid encoding a SRT2 polypeptide in a plant.

### 4. YRP2 Polypeptides

[0042] Surprisingly, it has now been found that modulating expression of a nucleic acid encoding a YRP2 polypeptide gives plants having enhanced tolerance to various abiotic stresses relative to control plants.

[0043] According one embodiment, there is provided a method for enhancing tolerance in plants to various abiotic stresses, relative to tolerance in control plants, comprising modulating expression of a nucleic acid encoding a YRP2 polypeptide in a plant.

### 5. YRP3 Polypeptides

[0044] Surprisingly, it has now been found that modulating expression of a nucleic acid encoding a YRP3 polypeptide gives plants having enhanced tolerance to various abiotic stresses relative to control plants.

[0045] According one embodiment, there is provided a method for enhancing tolerance in plants to various abiotic stresses, relative to tolerance in control plants, comprising modulating expression of a nucleic acid encoding a YRP3 polypeptide in a plant.

### 6. YRP4 Polypeptides

[0046] Surprisingly, it has now been found that modulating expression of a nucleic acid encoding a YRP4 polypeptide gives plants having enhanced tolerance to various abiotic stresses relative to control plants.

[0047] According one embodiment, there is provided a method for enhancing tolerance in plants to various abiotic stresses, relative to tolerance in control plants, comprising modulating expression of a nucleic acid encoding a YRP4 polypeptide in a plant.

### 7. SPX-RING (SYG1, Pho81, XPR1-Zinc Finger, RING-Type) Polypeptides

[0048] Surprisingly, it has now been found that modulating expression of a nucleic acid encoding a SPX-RING polypeptide gives plants having enhanced yield-related traits relative to control plants.

[0049] According one embodiment, there is provided a method enhancing yield related traits of a plant relative to control plants, comprising modulating expression of a nucleic acid encoding a SPX-RING polypeptide in a plant.

### DEFINITIONS

### Polypeptide(s)/Protein(s)

[0050] The terms “polypeptide” and “protein” are used interchangeably herein and refer to amino acids in a polymeric form of any length, linked together by peptide bonds.

### Polynucleotide(s)/Nucleic Acid(s)/Nucleic Acid Sequence(s)/Nucleotide Sequence(s)

[0051] The terms “polynucleotide(s)”, “nucleic acid sequence(s)”, “nucleotide sequence(s)”, “nucleic acid(s)”, “nucleic acid molecule” are used interchangeably herein and refer to nucleotides, either ribonucleotides or deoxyribonucleotides or a combination of both, in a polymeric unbranched form of any length.

### Control Plant(s)

[0052] The choice of suitable control plants is a routine part of an experimental setup and may include corresponding wild type plants or corresponding plants without the gene of interest. The control plant is typically of the same plant species or even of the same variety as the plant to be assessed. The control plant may also be a nullizygote of the plant to be assessed. Nullizygotes are individuals missing the transgene by segregation. A “control plant” as used herein refers not only to whole plants, but also to plant parts, including seeds and seed parts.

### Homologue(s)

[0053] “Homologues” of a protein encompass peptides, oligopeptides, polypeptides, proteins and enzymes having amino acid substitutions, deletions and/or insertions relative to the unmodified protein in question and having similar biological and functional activity as the unmodified protein from which they are derived.

[0054] A deletion refers to removal of one or more amino acids from a protein.

[0055] An insertion refers to one or more amino acid residues being introduced into a predetermined site in a protein. Insertions may comprise N-terminal and/or C-terminal fusions as well as intra-sequence insertions of single or multiple amino acids. Generally, insertions within the amino acid sequence will be smaller than N- or C-terminal fusions, of the order of about 1 to 10 residues. Examples of N- or C-terminal fusion proteins or peptides include the binding domain or activation domain of a transcriptional activator as used in the yeast two-hybrid system, phage coat proteins, (histidine)-6-tag, glutathione S-transferase-tag, protein A, maltose-binding protein, dihydrofolate reductase, Tag•100 epitope, c-myc epitope, FLAG®-epitope, lacZ, CMP (calmodulin-binding peptide), HA epitope, protein C epitope and VSV epitope.

[0056] A substitution refers to replacement of amino acids of the protein with other amino acids having similar properties (such as similar hydrophobicity, hydrophilicity, antigenicity, propensity to form or break α-helical structures or β-sheet structures). Amino acid substitutions are typically of single residues, but may be clustered depending upon functional constraints placed upon the polypeptide; insertions will usually be of the order of about 1 to 10 amino acid residues. The amino acid substitutions are preferably conservative amino acid substitutions. Conservative substitution tables are well known in the art (see for example Creighton (1984) Proteins. W.H. Freeman and Company (Eds) and Table 1 below).

TABLE 1
Examples of conserved amino acid substitutions

| Residue | Conservative Substitutions |
|---|---|
| Ala | Ser |
| Arg | Lys |
| Asn | Gln; His |
| Asp | Glu |
| Gln | Asn |
| Cys | Ser |
| Glu | Asp |
| Gly | Pro |
| His | Asn; Gln |
| Ile | Leu, Val |
| Leu | Ile; Val |
| Lys | Arg; Gln |
| Met | Leu; Ile |
| Phe | Met; Leu; Tyr |
| Ser | Thr; Gly |
| Thr | Ser; Val |
| Trp | Tyr |
| Tyr | Trp; Phe |
| Val | Ile; Leu |

[0057] Amino acid substitutions, deletions and/or insertions may readily be made using peptide synthetic techniques well known in the art, such as solid phase peptide synthesis and the like, or by recombinant DNA manipulation. Methods for the manipulation of DNA sequences to produce substitution, insertion or deletion variants of a protein are well known in the art. For example, techniques for making substitution mutations at predetermined sites in DNA are well known to those skilled in the art and include M13 mutagenesis, T7-Gen in vitro mutagenesis (USB, Cleveland, Ohio), QuickChange Site Directed mutagenesis (Stratagene, San Diego, Calif.), PCR-mediated site-directed mutagenesis or other site-directed mutagenesis protocols.

### Derivatives

[0058] “Derivatives” include peptides, oligopeptides, polypeptides which may, compared to the amino acid sequence of the naturally-occurring form of the protein, such as the protein of interest, comprise substitutions of amino acids with non-naturally occurring amino acid residues, or additions of non-naturally occurring amino acid residues. “Derivatives” of a protein also encompass peptides, oligopeptides, polypeptides which comprise naturally occurring altered (glycosylated, acylated, prenylated, phosphorylated, myristoylated, sulphated etc.) or non-naturally altered amino acid residues compared to the amino acid sequence of a naturally-occurring form of the polypeptide. A derivative may also comprise one or more non-amino acid substituents or additions compared to the amino acid sequence from which it is derived, for example a reporter molecule or other ligand, covalently or non-covalently bound to the amino acid sequence, such as a reporter molecule which is bound to facilitate its detection, and non-naturally occurring amino acid residues relative to the amino acid sequence of a naturally-occurring protein. Furthermore, “derivatives” also include fusions of the naturally-occurring form of the protein with tagging peptides such as FLAG, HIS6 or thioredoxin (for a review of tagging peptides, see Terpe, Appl. Microbiol. Biotechnol. 60, 523-533, 2003).

### Orthologue(s)/Paralogue(s)

[0059] Orthologues and paralogues encompass evolutionary concepts used to describe the ancestral relationships of genes. Paralogues are genes within the same species that have originated through duplication of an ancestral gene; orthologues are genes from different organisms that have originated through speciation, and are also derived from a common ancestral gene.

### Domain

[0060] The term “domain” refers to a set of amino acids conserved at specific positions along an alignment of sequences of evolutionarily related proteins. While amino acids at other positions can vary between homologues, amino acids that are highly conserved at specific positions indicate amino acids that are likely essential in the structure, stability or function of a protein. Identified by their high degree of conservation in aligned sequences of a family of protein homologues, they can be used as identifiers to determine if any polypeptide in question belongs to a previously identified polypeptide family.

### Motif/Consensus Sequence/Signature

[0061] The term “motif” or “consensus sequence” or “signature” refers to a short conserved region in the sequence of evolutionarily related proteins. Motifs are frequently highly conserved parts of domains, but may also include only part of the domain, or be located outside of conserved domain (if all of the amino acids of the motif fall outside of a defined domain).

### Hybridisation

[0062] The term “hybridisation” as defined herein is a process wherein substantially homologous complementary nucleotide sequences anneal to each other. The hybridisation process can occur entirely in solution, i.e. both complementary nucleic acids are in solution. The hybridisation process can also occur with one of the complementary nucleic acids immobilised to a matrix such as magnetic beads, Sepharose beads or any other resin.

[0063] The hybridisation process can furthermore occur with one of the complementary nucleic acids immobilised to a solid support such as a nitro-cellulose or nylon membrane or immobilised by e.g. photolithography to, for example, a siliceous glass support (the latter known as nucleic acid arrays or microarrays or as nucleic acid chips). In order to allow hybridisation to occur, the nucleic acid molecules are generally thermally or chemically denatured to melt a double strand into two single strands and/or to remove hairpins or other secondary structures from single stranded nucleic acids.

[0064] The term “stringency” refers to the conditions under which a hybridisation takes place. The stringency of hybridisation is influenced by conditions such as temperature, salt concentration, ionic strength and hybridisation buffer composition. Generally, low stringency conditions are selected to be about 30° C. lower than the thermal melting point (Tₘ) for the specific sequence at a defined ionic strength and pH. Medium stringency conditions are when the temperature is 20° C. below Tₘ, and high stringency conditions are when the temperature is 10° C. below Tₘ. High stringency hybridisation conditions are typically used for isolating hybridising sequences that have high sequence similarity to the target nucleic acid sequence. However, nucleic acids may deviate in sequence and still encode a substantially identical polypeptide, due to the degeneracy of the genetic code. Therefore medium stringency hybridisation conditions may sometimes be needed to identify such nucleic acid molecules.

[0065] The Tm is the temperature under defined ionic strength and pH, at which 50% of the target sequence hybridises to a perfectly matched probe. The Tₘ is dependent upon the solution conditions and the base composition and length of the probe. For example, longer sequences hybridise specifically at higher temperatures. The maximum rate of hybridisation is obtained from about 16° C. up to 32° C. below Tₘ. The presence of monovalent cations in the hybridisation solution reduce the electrostatic repulsion between the two nucleic acid strands thereby promoting hybrid formation; this effect is visible for sodium concentrations of up to 0.4M (for higher concentrations, this effect may be ignored). Formamide reduces the melting temperature of DNA-DNA and DNA-RNA duplexes with 0.6 to 0.7° C. for each percent formamide, and addition of 50% formamide allows hybridisation to be performed at 30 to 45° C., though the rate of hybridisation will be lowered. Base pair mismatches reduce the hybridisation rate and the thermal stability of the duplexes. On average and for large probes, the Tm decreases about 1° C. per % base mismatch. The Tm may be calculated using the following equations, depending on the types of hybrids:

1) DNA-DNA hybrids (Meinkoth and Wahl, Anal. Biochem., 138: 267-284, 1984):

Tₘ=81.5° C.+16.6×log₁₀[Na⁺]^{a}+0.41×%[G/C^{b}]−500×[L^{c}]⁻¹−0.61×% formamide

2) DNA-RNA or RNA-RNA hybrids:

Tm=79.8+18.5(log₁₀[Na⁺]^{a})+0.58(% G/C^{b})+11.8(% G/C^{b})²−820/L^{c}

3) oligo-DNA or oligo-RNAs hybrids:
[0066] For <20 nucleotides: Tₘ=2 (Iₙ)
[0067] For 20-35 nucleotides: Tₘ=22+1.46 (Iₙ) ^{a} or for other monovalent cation, but only accurate in the 0.01-0.4 M range.^{b} only accurate for % GC in the 30% to 75% range.^{c} L=length of duplex in base pairs.^{d} oligo, oligonucleotide; Iₙ,=effective length of primer=2×(no. of G/C)+(no. of A/T).

[0068] Non-specific binding may be controlled using any one of a number of known techniques such as, for example, blocking the membrane with protein containing solutions, additions of heterologous RNA, DNA, and SDS to the hybridisation buffer, and treatment with Rnase. For non-homologous probes, a series of hybridizations may be performed by varying one of (i) progressively lowering the annealing temperature (for example from 68° C. to 42° C.) or (ii) progressively lowering the formamide concentration (for example from 50% to 0%). The skilled artisan is aware of various parameters which may be altered during hybridisation and which will either maintain or change the stringency conditions.

[0069] Besides the hybridisation conditions, specificity of hybridisation typically also depends on the function of post-hybridisation washes. To remove background resulting from non-specific hybridisation, samples are washed with dilute salt solutions. Critical factors of such washes include the ionic strength and temperature of the final wash solution: the lower the salt concentration and the higher the wash temperature, the higher the stringency of the wash. Wash conditions are typically performed at or below hybridisation stringency. A positive hybridisation gives a signal that is at least twice of that of the background. Generally, suitable stringent conditions for nucleic acid hybridisation assays or gene amplification detection procedures are as set forth above. More or less stringent conditions may also be selected. The skilled artisan is aware of various parameters which may be altered during washing and which will either maintain or change the stringency conditions.

[0070] For example, typical high stringency hybridisation conditions for DNA hybrids longer than 50 nucleotides encompass hybridisation at 65° C. in 1×SSC or at 42° C. in 1×SSC and 50% formamide, followed by washing at 65° C. in 0.3×SSC. Examples of medium stringency hybridisation conditions for DNA hybrids longer than 50 nucleotides encompass hybridisation at 50° C. in 4×SSC or at 40° C. in 6×SSC and 50% formamide, followed by washing at 50° C. in 2×SSC. The length of the hybrid is the anticipated length for the hybridising nucleic acid. When nucleic acids of known sequence are hybridised, the hybrid length may be determined by aligning the sequences and identifying the conserved regions described herein. 1×SSC is 0.15M NaCl and 15 mM sodium citrate; the hybridisation solution and wash solutions may additionally include 5×Denhardt's reagent, 0.5-1.0% SDS, 100 μg/ml denatured, fragmented salmon sperm DNA, 0.5% sodium pyrophosphate.

[0071] For the purposes of defining the level of stringency, reference can be made to Sambrook et al. (2001) Molecular Cloning: a laboratory manual, 3rd Edition, Cold Spring Harbor Laboratory Press, CSH, New York or to Current Protocols in Molecular Biology, John Wiley & Sons, N.Y. (1989 and yearly updates).

### Splice Variant

[0072] The term “splice variant” as used herein encompasses variants of a nucleic acid sequence in which selected introns and/or exons have been excised, replaced, displaced or added, or in which introns have been shortened or lengthened. Such variants will be ones in which the biological activity of the protein is substantially retained; this may be achieved by selectively retaining functional segments of the protein. Such splice variants may be found in nature or may be manmade. Methods for predicting and isolating such splice variants are well known in the art (see for example Foissac and Schiex (2005) BMC Bioinformatics 6: 25).

### Allelic Variant

[0073] Alleles or allelic variants are alternative forms of a given gene, located at the same chromosomal position. Allelic variants encompass Single Nucleotide Polymorphisms (SNPs), as well as Small Insertion/Deletion Polymorphisms (INDELs). The size of INDELs is usually less than 100 bp. SNPs and INDELs form the largest set of sequence variants in naturally occurring polymorphic strains of most organisms.

### Gene Shuffling/Directed Evolution

[0074] Gene shuffling or directed evolution consists of iterations of DNA shuffling followed by appropriate screening and/or selection to generate variants of nucleic acids or portions thereof encoding proteins having a modified biological activity (Castle et al., (2004) Science 304(5674): 1151-4; U.S. Pat. Nos. 5,811,238 and 6,395,547).

### Regulatory Element/Control Sequence/Promoter

[0075] The terms “regulatory element”, “control sequence” and “promoter” are all used interchangeably herein and are to be taken in a broad context to refer to regulatory nucleic acid sequences capable of effecting expression of the sequences to which they are ligated. The term “promoter” typically refers to a nucleic acid control sequence located upstream from the transcriptional start of a gene and which is involved in recognising and binding of RNA polymerase and other proteins, thereby directing transcription of an operably linked nucleic acid. Encompassed by the aforementioned terms are transcriptional regulatory sequences derived from a classical eukaryotic genomic gene (including the TATA box which is required for accurate transcription initiation, with or without a CCAAT box sequence) and additional regulatory elements (i.e. upstream activating sequences, enhancers and silencers) which alter gene expression in response to developmental and/or external stimuli, or in a tissue-specific manner. Also included within the term is a transcriptional regulatory sequence of a classical prokaryotic gene, in which case it may include a −35 box sequence and/or −10 box transcriptional regulatory sequences. The term “regulatory element” also encompasses a synthetic fusion molecule or derivative that confers, activates or enhances expression of a nucleic acid molecule in a cell, tissue or organ.

[0076] A “plant promoter” comprises regulatory elements, which mediate the expression of a coding sequence segment in plant cells. Accordingly, a plant promoter need not be of plant origin, but may originate from viruses or micro-organisms, for example from viruses which attack plant cells. The “plant promoter” can also originate from a plant cell, e.g. from the plant which is transformed with the nucleic acid sequence to be expressed in the inventive process and described herein. This also applies to other “plant” regulatory signals, such as “plant” terminators. The promoters upstream of the nucleotide sequences useful in the methods of the present invention can be modified by one or more nucleotide substitution(s), insertion(s) and/or deletion(s) without interfering with the functionality or activity of either the promoters, the open reading frame (ORF) or the 3′-regulatory region such as terminators or other 3′ regulatory regions which are located away from the ORF. It is furthermore possible that the activity of the promoters is increased by modification of their sequence, or that they are replaced completely by more active promoters, even promoters from heterologous organisms. For expression in plants, the nucleic acid molecule must, as described above, be linked operably to or comprise a suitable promoter which expresses the gene at the right point in time and with the required spatial expression pattern.

[0077] For the identification of functionally equivalent promoters, the promoter strength and/or expression pattern of a candidate promoter may be analysed for example by operably linking the promoter to a reporter gene and assaying the expression level and pattern of the reporter gene in various tissues of the plant. Suitable well-known reporter genes include for example beta-glucuronidase or beta-galactosidase. The promoter activity is assayed by measuring the enzymatic activity of the beta-glucuronidase or beta-galactosidase. The promoter strength and/or expression pattern may then be compared to that of a reference promoter (such as the one used in the methods of the present invention). Alternatively, promoter strength may be assayed by quantifying mRNA levels or by comparing mRNA levels of the nucleic acid used in the methods of the present invention, with mRNA levels of housekeeping genes such as 18S rRNA, using methods known in the art, such as Northern blotting with densitometric analysis of autoradiograms, quantitative real-time PCR or RT-PCR (Heid et al., 1996 Genome Methods 6: 986-994). Generally by “weak promoter” is intended a promoter that drives expression of a coding sequence at a low level. By “low level” is intended at levels of about 1/10,000 transcripts to about 1/100,000 transcripts, to about 1/500,0000 transcripts per cell. Conversely, a “strong promoter” drives expression of a coding sequence at high level, or at about 1/10 transcripts to about 1/100 transcripts to about 1/1000 transcripts per cell. Generally, by “medium strength promoter” is intended a promoter that drives expression of a coding sequence at a lower level than a strong promoter, in particular at a level that is in all instances below that obtained when under the control of a 35S CaMV promoter.

### Operably Linked

[0078] The term “operably linked” as used herein refers to a functional linkage between the promoter sequence and the gene of interest, such that the promoter sequence is able to initiate transcription of the gene of interest.

### Constitutive Promoter

[0079] A “constitutive promoter” refers to a promoter that is transcriptionally active during most, but not necessarily all, phases of growth and development and under most environmental conditions, in at least one cell, tissue or organ. Table 2a below gives examples of constitutive promoters.

TABLE 2a
Examples of constitutive promoters

| Gene Source | Reference |
|---|---|
| Actin | McElroy et al, Plant Cell, 2: 163-171, 1990 |
| HMGP | WO 2004/070039 |
| CAMV 35S | Odell et al, Nature, 313: 810-812, 1985 |
| CaMV 19S | Nilsson et al., Physiol. Plant. 100: 456-462, 1997 |
| GOS2 | de Pater et al, Plant J Nov; 2(6): 837-44, 1992, |
| | WO 2004/065596 |
| Ubiquitin | Christensen et al, Plant Mol. Biol. 18: 675-689, 1992 |
| Rice cyclophilin | Buchholz et al, Plant Mol Biol. 25(5): 837-43, 1994 |
| Maize H3 histone | Lepetit et al, Mol. Gen. Genet. 231: 276-285, 1992 |
| Alfalfa H3 | Wu et al. Plant Mol. Biol. 11: 641-649, 1988 |
| histone | |
| Actin 2 | An et al, Plant J. 10(1); 107-121, 1996 |
| 34S FMV | Sanger et al., Plant. Mol. Biol., 14, 1990: 433-443 |
| Rubisco small | U.S. Pat. No. 4,962,028 |
| subunit | |
| OCS | Leisner (1988) Proc Natl Acad Sci USA 85(5): 2553 |
| SAD1 | Jain et al., Crop Science, 39 (6), 1999: 1696 |
| SAD2 | Jain et al., Crop Science, 39 (6), 1999: 1696 |
| nos | Shaw et al. (1984) Nucleic acid sequences Res. |
| | 12(20): 7831-7846 |
| V-ATPase | WO 01/14572 |
| Super promoter | WO 95/14098 |
| G-box proteins | WO 94/12015 |

### Ubiquitous Promoter

[0080] A ubiquitous promoter is active in substantially all tissues or cells of an organism.

### Developmentally-Regulated Promoter

[0081] A developmentally-regulated promoter is active during certain developmental stages or in parts of the plant that undergo developmental changes.

### Inducible Promoter

[0082] An inducible promoter has induced or increased transcription initiation in response to a chemical (for a review see Gatz 1997, Annu. Rev. Plant Physiol. Plant Mol. Biol., 48:89-108), environmental or physical stimulus, or may be “stress-inducible”, i.e. activated when a plant is exposed to various stress conditions, or a “pathogen-inducible” i.e. activated when a plant is exposed to exposure to various pathogens.

### Organ-Specific/Tissue-Specific Promoter

[0083] An organ-specific or tissue-specific promoter is one that is capable of preferentially initiating transcription in certain organs or tissues, such as the leaves, roots, seed tissue etc. For example, a “root-specific promoter” is a promoter that is transcriptionally active predominantly in plant roots, substantially to the exclusion of any other parts of a plant, whilst still allowing for any leaky expression in these other plant parts. Promoters able to initiate transcription in certain cells only are referred to herein as “cell-specific”.

[0084] Examples of root-specific promoters are listed in Table 2b below:

TABLE 2b
Examples of root-specific promoters

| Gene Source | Reference |
|---|---|
| RCc3 | Plant Mol Biol. 1995 January; 27(2): 237-48 |
| Arabidopsis PHT1 | Kovama et al., 2005; Mudge et al. (2002, |
| | Plant J. 31: 341) |
| Medicago phosphate | Xiao et al., 2006 |
| transporter | |
| Arabidopsis Pyk10 | Nitz et al. (2001) Plant Sci 161 (2): 337-346 |
| root-expressible genes | Tingey et al., EMBO J. 6: 1, 1987. |
| tobacco auxin- | Van der Zaal et al., Plant Mol. Biol. 16, |
| inducible gene | 983, 1991. |
| β-tubulin | Oppenheimer, et al., Gene 63: 87, 1988. |
| tobacco root- | Conkling, et al., Plant Physiol. 93: 1203, 1990. |
| specific genes | |
| B. napus G1-3b gene | U.S. Pat. No. 5,401,836 |
| SbPRP1 | Suzuki et al., Plant Mol. Biol. 21: 109-119, |
| | 1993. |
| LRX1 | Baumberger et al. 2001, Genes & Dev. 15: 1128 |
| BTG-26 Brassica | US 20050044585 |
| napus | |
| LeAMT1 (tomato) | Lauter et al. (1996, PNAS 3: 8139) |
| The LeNRT1-1 | Lauter et al. (1996, PNAS 3: 8139) |
| (tomato) | |
| class I patatin | Liu et al., Plant Mol. Biol. 153: 386-395, 1991. |
| gene (potato) | |
| KDC1 (Daucus | Downey et al. (2000, J. Biol. Chem. 275: 39420) |
| carota) | |
| TobRB7 gene | W Song (1997) PhD Thesis, North Carolina State |
| | University, Raleigh, NC USA |
| OsRAB5a (rice) | Wang et al. 2002, Plant Sci. 163: 273 |
| ALF5 (Arabidopsis) | Diener et al. (2001, Plant Cell 13: 1625) |
| NRT2; 1Np (N. | Quesada et al. (1997, Plant Mol. Biol. 34: 265) |
| plumbaginifolia) | |

[0085] A seed-specific promoter is transcriptionally active predominantly in seed tissue, but not necessarily exclusively in seed tissue (in cases of leaky expression). The seed-specific promoter may be active during seed development and/or during germination. The seed specific promoter may be endosperm/aleurone/embryo specific. Examples of seed-specific promoters (endosperm/aleurone/embryo specific) are shown in Table 2c to Table 2f below. Further examples of seed-specific promoters are given in Qing Qu and Takaiwa (Plant Biotechnol. J. 2, 113-125, 2004), which disclosure is incorporated by reference herein as if fully set forth.

TABLE 2c
Examples of seed-specific promoters

| Gene source | Reference |
|---|---|
| seed-specific genes | Simon et al., Plant Mol. Biol. 5: 191, 1985; |
| | Scofield et al., J. Biol. Chem. 262: 12202, 1987.; |
| | Baszczynski et al., Plant Mol. Biol. 14: 633, 1990. |
| Brazil Nut albumin | Pearson et al., Plant Mol. Biol. 18: 235-245, 1992. |
| legumin | Ellis et al., Plant Mol. Biol. 10: 203-214, 1988. |
| glutelin (rice) | Takaiwa et al., Mol. Gen. Genet. 208: 15-22, 1986; |
| | Takaiwa et al., FEBS Letts. 221: 43-47, 1987. |
| zein | Matzke et al Plant Mol Biol, 14(3): 323-32 1990 |
| napA | Stalberg et al, Planta 199: 515-519, 1996. |
| wheat LMW and HMW | Mol Gen Genet 216: 81-90, 1989; NAR 17: 461-2, 1989 |
| glutenin-1 | |
| wheat SPA | Albani et al, Plant Cell, 9: 171-184, 1997 |
| wheat α, β, γ-gliadins | EMBO J. 3: 1409-15, 1984 |
| barley Itr1 promoter | Diaz et al. (1995) Mol Gen Genet 248(5): 592-8 |
| barley B1, C, D, hordein | Theor Appl Gen 98: 1253-62, 1999; Plant J 4: 343-55, |
| | 1993; Mol Gen Genet 250: 750-60, 1996 |
| barley DOF | Mena et al, The Plant Journal, 116(1): 53-62, 1998 |
| blz2 | EP99106056.7 |
| synthetic promoter | Vicente-Carbajosa et al., Plant J. 13: 629-640, 1998. |
| rice prolamin NRP33 | Wu et al, Plant Cell Physiology 39(8) 885-889, 1998 |
| rice a-globulin Glb-1 | Wu et al, Plant Cell Physiology 39(8) 885-889, 1998 |
| rice OSH1 | Sato et al, Proc. Natl. Acad. Sci. USA, 93: 8117-8122, |
| | 1996 |
| rice α-globulin REB/OHP-1 | Nakase et al. Plant Mol. Biol. 33: 513-522, 1997 |
| rice ADP-glucose pyrophos- | Trans Res 6: 157-68, 1997 |
| phorylase | |
| maize ESR gene family | Plant J 12: 235-46, 1997 |
| sorghum α-kafirin | DeRose et al., Plant Mol. Biol 32: 1029-35, 1996 |
| KNOX | Postma-Haarsma et al, Plant Mol. Biol. 39: 257-71, 1999 |
| rice oleosin | Wu et al, J. Biochem. 123: 386, 1998 |
| sunflower oleosin | Cummins et al., Plant Mol. Biol. 19: 873-876, 1992 |
| PRO0117, putative rice 40S | WO 2004/070039 |
| ribosomal protein | |
| PRO0136, rice alanine | unpublished |
| aminotransferase | |
| PRO0147, trypsin inhibitor | unpublished |
| ITR1 (barley) | |
| PRO0151, rice WSI18 | WO 2004/070039 |
| PRO0175, rice RAB21 | WO 2004/070039 |
| PRO005 | WO 2004/070039 |
| PRO0095 | WO 2004/070039 |
| α-amylase (Amy32b) | Lanahan et al, Plant Cell 4: 203-211, 1992; Skriver et al, |
| | Proc Natl Acad Sci USA 88: 7266-7270, 1991 |
| cathepsin β-like gene | Cejudo et al, Plant Mol Biol 20: 849-856, 1992 |
| Barley Ltp2 | Kalla et al., Plant J. 6: 849-60, 1994 |
| Chi26 | Leah et al., Plant J. 4: 579-89, 1994 |
| Maize B-Peru | Selinger et al., Genetics 149; 1125-38, 1998 |

TABLE 2d
examples of endosperm-specific promoters

| Gene source | Reference |
|---|---|
| glutelin (rice) | Takaiwa et al. (1986) Mol Gen Genet 208: 15-22; |
| | Takaiwa et al. (1987) FEBS Letts. 221: 43-47 |
| zein | Matzke et al., (1990) Plant Mol Biol 14(3): 323-32 |
| wheat LMW | Colot et al. (1989) Mol Gen Genet 216: 81-90, |
| and HMW | Anderson et al. (1989) NAR 17: 461-2 |
| glutenin-1 | |
| wheat SPA | Albani et al. (1997) Plant Cell 9: 171-184 |
| wheat gliadins | Rafalski et al. (1984) EMBO 3: 1409-15 |
| barley Itr1 | Diaz et al. (1995) Mol Gen Genet 248(5): 592-8 |
| promoter | |
| barley B1, C, D, | Cho et al. (1999) Theor Appl Genet 98: 1253-62; |
| hordein | Muller et al. (1993) Plant J 4: 343-55; |
| | Sorenson et al. (1996) Mol Gen Genet 250: 750-60 |
| barley DOF | Mena et al, (1998) Plant J 116(1): 53-62 |
| blz2 | Onate et al. (1999) J Biol Chem 274(14): 9175-82 |
| synthetic promoter | Vicente-Carbajosa et al. (1998) Plant J 13: 629-640 |
| rice prolamin | Wu et al, (1998) Plant Cell Physiol 39(8) 885-889 |
| NRP33 | |
| rice globulin | Wu et al. (1998) Plant Cell Physiol 39(8) 885-889 |
| Glb-1 | |
| rice globulin | Nakase et al. (1997) Plant Molec Biol 33: 513-522 |
| REB/OHP-1 | |
| rice ADP-glucose | Russell et al. (1997) Trans Res 6: 157-68 |
| pyrophosphorylase | |
| maize ESR | Opsahl-Ferstad et al. (1997) Plant J 12: 235-46 |
| gene family | |
| sorghum kafirin | DeRose et al. (1996) Plant Mol Biol 32: 1029-35 |

TABLE 2e
Examples of embryo specific promoters:

| Gene source | Reference |
|---|---|
| rice OSH1 | Sato et al, Proc. Natl. Acad. Sci. USA, 93: 8117-8122, |
| | 1996 |
| KNOX | Postma-Haarsma et al, Plant Mol. Biol. 39: 257-71, 1999 |
| PRO0151 | WO 2004/070039 |
| PRO0175 | WO 2004/070039 |
| PRO005 | WO 2004/070039 |
| PRO0095 | WO 2004/070039 |

TABLE 2f
Examples of aleurone-specific promoters:

| Gene source | Reference |
|---|---|
| α-amylase | Lanahan et al, Plant Cell 4: 203-211, 1992; |
| (Amy32b) | Skriver et al, Proc Natl Acad Sci USA 88: |
| | 7266-7270, 1991 |
| cathepsin β-like gene | Cejudo et al, Plant Mol Biol 20: 849-856, 1992 |
| Barley Ltp2 | Kalla et al., Plant J. 6: 849-60, 1994 |
| Chi26 | Leah et al., Plant J. 4: 579-89, 1994 |
| Maize B-Peru | Selinger et al., Genetics 149; 1125-38, 1998 |

[0086] A green tissue-specific promoter as defined herein is a promoter that is transcriptionally active predominantly in green tissue, substantially to the exclusion of any other parts of a plant, whilst still allowing for any leaky expression in these other plant parts.

[0087] Examples of green tissue-specific promoters which may be used to perform the methods of the invention are shown in Table 2g below.

TABLE 2g
Examples of green tissue-specific promoters

| Gene | Expression | Reference |
|---|---|---|
| Maize Orthophosphate dikinase | Leaf specific | Fukavama et al., 2001 |
| Maize Phosphoenolpyruvate | Leaf specific | Kausch et al., 2001 |
| carboxylase | | |
| Rice Phosphoenolpyruvate | Leaf specific | Liu et al., 2003 |
| carboxylase | | |
| Rice small subunit Rubisco | Leaf specific | Nomura et al., 2000 |
| rice beta expansin EXBP9 | Shoot specific | WO 2004/070039 |
| Pigeonpea small subunit Rubisco | Leaf specific | Panguluri et al., 2005 |
| Pea RBCS3A | Leaf specific | |

[0088] Another example of a tissue-specific promoter is a meristem-specific promoter, which is transcriptionally active predominantly in meristematic tissue, substantially to the exclusion of any other parts of a plant, whilst still allowing for any leaky expression in these other plant parts. Examples of green meristem-specific promoters which may be used to perform the methods of the invention are shown in Table 2h below.

TABLE 2h
Examples of meristem-specific promoters

| Gene source | Expression pattern | Reference |
|---|---|---|
| rice OSH1 | Shoot apical meristem, | Sato et al. (1996) |
| | from embryo globular | Proc. Natl. Acad. Sci. |
| | stage to seedling stage | USA, 93: 8117-8122 |
| Rice metallothionein | Meristem specific | BAD87835.1 |
| WAK1 & WAK 2 | Shoot and root apical | Wagner & Kohorn |
| | meristems, and in ex- | (2001) Plant Cell |
| | panding leaves and sepals | 13(2): 303-318 |

### Terminator

[0089] The term “terminator” encompasses a control sequence which is a DNA sequence at the end of a transcriptional unit which signals 3′ processing and polyadenylation of a primary transcript and termination of transcription. The terminator can be derived from the natural gene, from a variety of other plant genes, or from T-DNA. The terminator to be added may be derived from, for example, the nopaline synthase or octopine synthase genes, or alternatively from another plant gene, or less preferably from any other eukaryotic gene.

### Modulation

[0090] The term “modulation” means in relation to expression or gene expression, a process in which the expression level is changed by said gene expression in comparison to the control plant, the expression level may be increased or decreased. The original, unmodulated expression may be of any kind of expression of a structural RNA (rRNA, tRNA) or mRNA with subsequent translation. The term “modulating the activity” shall mean any change of the expression of the inventive nucleic acid sequences or encoded proteins, which leads to increased yield and/or increased growth of the plants.

### Expression

[0091] The term “expression” or “gene expression” means the transcription of a specific gene or specific genes or specific genetic construct. The term “expression” or “gene expression” in particular means the transcription of a gene or genes or genetic construct into structural RNA (rRNA, tRNA) or mRNA with or without subsequent translation of the latter into a protein. The process includes transcription of DNA and processing of the resulting mRNA product.

### Increased Expression/Overexpression

[0092] The term “increased expression” or “overexpression” as used herein means any form of expression that is additional to the original wild-type expression level.

[0093] Methods for increasing expression of genes or gene products are well documented in the art and include, for example, overexpression driven by appropriate promoters, the use of transcription enhancers or translation enhancers. Isolated nucleic acids which serve as promoter or enhancer elements may be introduced in an appropriate position (typically upstream) of a non-heterologous form of a polynucleotide so as to upregulate expression of a nucleic acid encoding the polypeptide of interest. For example, endogenous promoters may be altered in vivo by mutation, deletion, and/or substitution (see, Kmiec, U.S. Pat. No. 5,565,350; Zarling et al., WO9322443), or isolated promoters may be introduced into a plant cell in the proper orientation and distance from a gene of the present invention so as to control the expression of the gene.

[0094] If polypeptide expression is desired, it is generally desirable to include a polyadenylation region at the 3′-end of a polynucleotide coding region. The polyadenylation region can be derived from the natural gene, from a variety of other plant genes, or from T-DNA. The 3′ end sequence to be added may be derived from, for example, the nopaline synthase or octopine synthase genes, or alternatively from another plant gene, or less preferably from any other eukaryotic gene.

[0095] An intron sequence may also be added to the 5′ untranslated region (UTR) or the coding sequence of the partial coding sequence to increase the amount of the mature message that accumulates in the cytosol. Inclusion of a spliceable intron in the transcription unit in both plant and animal expression constructs has been shown to increase gene expression at both the mRNA and protein levels up to 1000-fold (Buchman and Berg (1988) Mol. Cell biol. 8: 4395-4405; Callis et al. (1987) Genes Dev 1:1183-1200). Such intron enhancement of gene expression is typically greatest when placed near the 5 end of the transcription unit. Use of the maize introns Adh1-S intron 1, 2, and 6, the Bronze-1 intron are known in the art. For general information see: The Maize Handbook, Chapter 116, Freeling and Walbot, Eds., Springer, N.Y. (1994).

### Endogenous Gene

[0096] Reference herein to an “endogenous” gene not only refers to the gene in question as found in a plant in its natural form (i.e., without there being any human intervention), but also refers to that same gene (or a substantially homologous nucleic acid/gene) in an isolated form subsequently (re)introduced into a plant (a transgene). For example, a transgenic plant containing such a transgene may encounter a substantial reduction of the transgene expression and/or substantial reduction of expression of the endogenous gene. The isolated gene may be isolated from an organism or may be manmade, for example by chemical synthesis.

### Decreased Expression

[0097] Reference herein to “decreased expression” or “reduction or substantial elimination” of expression is taken to mean a decrease in endogenous gene expression and/or polypeptide levels and/or polypeptide activity relative to control plants. The reduction or substantial elimination is in increasing order of preference at least 10%, 20%, 30%, 40% or 50%, 60%, 70%, 80%, 85%, 90%, or 95%, 96%, 97%, 98%, 99% or more reduced compared to that of control plants. Methods for decreasing expression are known in the art and the skilled person would readily be able to adapt the known methods for silencing so as to achieve reduction of expression of an endogenous gene in a whole plant or in parts thereof through the use of an appropriate promoter, for example.

[0098] For the reduction or substantial elimination of expression an endogenous gene in a plant, a sufficient length of substantially contiguous nucleotides of a nucleic acid sequence is required. In order to perform gene silencing, this may be as little as 20, 19, 18, 17, 16, 15, 14, 13, 12, 11, 10 or fewer nucleotides, alternatively this may be as much as the entire gene (including the 5′ and/or 3′ UTR, either in part or in whole). The stretch of substantially contiguous nucleotides may be derived from the nucleic acid encoding the protein of interest (target gene), or from any nucleic acid capable of encoding an orthologue, paralogue or homologue of the protein of interest. Preferably, the stretch of substantially contiguous nucleotides is capable of forming hydrogen bonds with the target gene (either sense or antisense strand), more preferably, the stretch of substantially contiguous nucleotides has, in increasing order of preference, 50%, 60%, 70%, 80%, 85%, 90%, 95%, 96%, 97%, 98%, 99%, 100% sequence identity to the target gene (either sense or antisense strand). A nucleic acid sequence encoding a (functional) polypeptide is not a requirement for the various methods discussed herein for the reduction or substantial elimination of expression of an endogenous gene.

[0099] Examples of various methods for the reduction or substantial elimination of expression in a plant of an endogenous gene, or for lowering levels and/or activity of a protein, are known to the skilled in the art. A skilled person would readily be able to adapt the known methods for silencing, so as to achieve reduction of expression of an endogenous gene in a whole plant or in parts thereof through the use of an appropriate promoter, for example.

[0100] This reduction or substantial elimination of expression may be achieved using routine tools and techniques. A preferred method for the reduction or substantial elimination of endogenous gene expression is by introducing and expressing in a plant a genetic construct into which the nucleic acid (in this case a stretch of substantially contiguous nucleotides derived from the gene of interest, or from any nucleic acid capable of encoding an orthologue, paralogue or homologue of any one of the protein of interest) is cloned as an inverted repeat (in part or completely), separated by a spacer (non-coding DNA).

[0101] In such a preferred method, expression of the endogenous gene is reduced or substantially eliminated through RNA-mediated silencing using an inverted repeat of a nucleic acid or a part thereof (in this case a stretch of substantially contiguous nucleotides derived from the gene of interest, or from any nucleic acid capable of encoding an orthologue, paralogue or homologue of the protein of interest), preferably capable of forming a hairpin structure. The inverted repeat is cloned in an expression vector comprising control sequences. A non-coding DNA nucleic acid sequence (a spacer, for example a matrix attachment region fragment (MAR), an intron, a polylinker, etc.) is located between the two inverted nucleic acids forming the inverted repeat. After transcription of the inverted repeat, a chimeric RNA with a self-complementary structure is formed (partial or complete). This double-stranded RNA structure is referred to as the hairpin RNA (hpRNA). The hpRNA is processed by the plant into siRNAs that are incorporated into an RNA-induced silencing complex (RISC). The RISC further cleaves the mRNA transcripts, thereby substantially reducing the number of mRNA transcripts to be translated into polypeptides. For further general details see for example, Grierson et al. (1998) WO 98/53083; Waterhouse et al. (1999) WO 99/53050).

[0102] Performance of the methods of the invention does not rely on introducing and expressing in a plant a genetic construct into which the nucleic acid is cloned as an inverted repeat, but any one or more of several well-known “gene silencing” methods may be used to achieve the same effects.

[0103] One such method for the reduction of endogenous gene expression is RNA-mediated silencing of gene expression (downregulation). Silencing in this case is triggered in a plant by a double stranded RNA sequence (dsRNA) that is substantially similar to the target endogenous gene. This dsRNA is further processed by the plant into about 20 to about 26 nucleotides called short interfering RNAs (siRNAs). The siRNAs are incorporated into an RNA-induced silencing complex (RISC) that cleaves the mRNA transcript of the endogenous target gene, thereby substantially reducing the number of mRNA transcripts to be translated into a polypeptide. Preferably, the double stranded RNA sequence corresponds to a target gene.

[0104] Another example of an RNA silencing method involves the introduction of nucleic acid sequences or parts thereof (in this case a stretch of substantially contiguous nucleotides derived from the gene of interest, or from any nucleic acid capable of encoding an orthologue, paralogue or homologue of the protein of interest) in a sense orientation into a plant. “Sense orientation” refers to a DNA sequence that is homologous to an mRNA transcript thereof. Introduced into a plant would therefore be at least one copy of the nucleic acid sequence. The additional nucleic acid sequence will reduce expression of the endogenous gene, giving rise to a phenomenon known as co-suppression. The reduction of gene expression will be more pronounced if several additional copies of a nucleic acid sequence are introduced into the plant, as there is a positive correlation between high transcript levels and the triggering of co-suppression.

[0105] Another example of an RNA silencing method involves the use of antisense nucleic acid sequences. An “antisense” nucleic acid sequence comprises a nucleotide sequence that is complementary to a “sense” nucleic acid sequence encoding a protein, i.e. complementary to the coding strand of a double-stranded cDNA molecule or complementary to an mRNA transcript sequence. The antisense nucleic acid sequence is preferably complementary to the endogenous gene to be silenced. The complementarity may be located in the “coding region” and/or in the “non-coding region” of a gene. The term “coding region” refers to a region of the nucleotide sequence comprising codons that are translated into amino acid residues. The term “non-coding region” refers to 5′ and 3′ sequences that flank the coding region that are transcribed but not translated into amino acids (also referred to as 5′ and 3′ untranslated regions).

[0106] Antisense nucleic acid sequences can be designed according to the rules of Watson and Crick base pairing. The antisense nucleic acid sequence may be complementary to the entire nucleic acid sequence (in this case a stretch of substantially contiguous nucleotides derived from the gene of interest, or from any nucleic acid capable of encoding an orthologue, paralogue or homologue of the protein of interest), but may also be an oligonucleotide that is antisense to only a part of the nucleic acid sequence (including the mRNA 5′ and 3′ UTR). For example, the antisense oligonucleotide sequence may be complementary to the region surrounding the translation start site of an mRNA transcript encoding a polypeptide. The length of a suitable antisense oligonucleotide sequence is known in the art and may start from about 50, 45, 40, 35, 30, 25, 20, 15 or 10 nucleotides in length or less. An antisense nucleic acid sequence according to the invention may be constructed using chemical synthesis and enzymatic ligation reactions using methods known in the art. For example, an antisense nucleic acid sequence (e.g., an antisense oligonucleotide sequence) may be chemically synthesized using naturally occurring nucleotides or variously modified nucleotides designed to increase the biological stability of the molecules or to increase the physical stability of the duplex formed between the antisense and sense nucleic acid sequences, e.g., phosphorothioate derivatives and acridine substituted nucleotides may be used. Examples of modified nucleotides that may be used to generate the antisense nucleic acid sequences are well known in the art. Known nucleotide modifications include methylation, cyclization and ‘caps’ and substitution of one or more of the naturally occurring nucleotides with an analogue such as inosine. Other modifications of nucleotides are well known in the art.

[0107] The antisense nucleic acid sequence can be produced biologically using an expression vector into which a nucleic acid sequence has been subcloned in an antisense orientation (i.e., RNA transcribed from the inserted nucleic acid will be of an antisense orientation to a target nucleic acid of interest). Preferably, production of antisense nucleic acid sequences in plants occurs by means of a stably integrated nucleic acid construct comprising a promoter, an operably linked antisense oligonucleotide, and a terminator.

[0108] The nucleic acid molecules used for silencing in the methods of the invention (whether introduced into a plant or generated in situ) hybridize with or bind to mRNA transcripts and/or genomic DNA encoding a polypeptide to thereby inhibit expression of the protein, e.g., by inhibiting transcription and/or translation. The hybridization can be by conventional nucleotide complementarity to form a stable duplex, or, for example, in the case of an antisense nucleic acid sequence which binds to DNA duplexes, through specific interactions in the major groove of the double helix. Antisense nucleic acid sequences may be introduced into a plant by transformation or direct injection at a specific tissue site. Alternatively, antisense nucleic acid sequences can be modified to target selected cells and then administered systemically. For example, for systemic administration, antisense nucleic acid sequences can be modified such that they specifically bind to receptors or antigens expressed on a selected cell surface, e.g., by linking the antisense nucleic acid sequence to peptides or antibodies which bind to cell surface receptors or antigens. The antisense nucleic acid sequences can also be delivered to cells using the vectors described herein.

[0109] According to a further aspect, the antisense nucleic acid sequence is an a-anomeric nucleic acid sequence. An a-anomeric nucleic acid sequence forms specific double-stranded hybrids with complementary RNA in which, contrary to the usual b-units, the strands run parallel to each other (Gaultier et al. (1987) Nucl Ac Res 15: 6625-6641). The antisense nucleic acid sequence may also comprise a 2′-o-methylribonucleotide (Inoue et al. (1987) Nucl Ac Res 15, 6131-6148) or a chimeric RNA-DNA analogue (Inoue et al. (1987) FEBS Lett. 215, 327-330).

[0110] The reduction or substantial elimination of endogenous gene expression may also be performed using ribozymes. Ribozymes are catalytic RNA molecules with ribonuclease activity that are capable of cleaving a single-stranded nucleic acid sequence, such as an mRNA, to which they have a complementary region. Thus, ribozymes (e.g., hammerhead ribozymes (described in Haselhoff and Gerlach (1988) Nature 334, 585-591) can be used to catalytically cleave mRNA transcripts encoding a polypeptide, thereby substantially reducing the number of mRNA transcripts to be translated into a polypeptide. A ribozyme having specificity for a nucleic acid sequence can be designed (see for example: Cech et al. U.S. Pat. No. 4,987,071; and Cech et al. U.S. Pat. No. 5,116,742). Alternatively, mRNA transcripts corresponding to a nucleic acid sequence can be used to select a catalytic RNA having a specific ribonuclease activity from a pool of RNA molecules (Bartel and Szostak (1993) Science 261, 1411-1418). The use of ribozymes for gene silencing in plants is known in the art (e.g., Atkins et al. (1994) WO 94/00012; Lenne et al. (1995) WO 95/03404; Lutziger et al. (2000) WO 00/00619; Prinsen et al. (1997) WO 97/13865 and Scott et al. (1997) WO 97/38116).

[0111] Gene silencing may also be achieved by insertion mutagenesis (for example, T-DNA insertion or transposon insertion) or by strategies as described by, among others, Angell and Baulcombe ((1999) Plant J 20(3): 357-62), (Amplicon VIGS WO 98/36083), or Baulcombe (WO 99/15682).

[0112] Gene silencing may also occur if there is a mutation on an endogenous gene and/or a mutation on an isolated gene/nucleic acid subsequently introduced into a plant. The reduction or substantial elimination may be caused by a non-functional polypeptide. For example, the polypeptide may bind to various interacting proteins; one or more mutation(s) and/or truncation(s) may therefore provide for a polypeptide that is still able to bind interacting proteins (such as receptor proteins) but that cannot exhibit its normal function (such as signalling ligand).

[0113] A further approach to gene silencing is by targeting nucleic acid sequences complementary to the regulatory region of the gene (e.g., the promoter and/or enhancers) to form triple helical structures that prevent transcription of the gene in target cells. See Helene, C., Anticancer Drug Res. 6, 569-84, 1991; Helene et al., Ann. N.Y. Acad. Sci. 660, 27-36 1992; and Maher, L. J. Bioassays 14, 807-15, 1992.

[0114] Other methods, such as the use of antibodies directed to an endogenous polypeptide for inhibiting its function in planta, or interference in the signalling pathway in which a polypeptide is involved, will be well known to the skilled man. In particular, it can be envisaged that manmade molecules may be useful for inhibiting the biological function of a target polypeptide, or for interfering with the signalling pathway in which the target polypeptide is involved.

[0115] Alternatively, a screening program may be set up to identify in a plant population natural variants of a gene, which variants encode polypeptides with reduced activity. Such natural variants may also be used for example, to perform homologous recombination.

[0116] Artificial and/or natural microRNAs (miRNAs) may be used to knock out gene expression and/or mRNA translation. Endogenous miRNAs are single stranded small RNAs of typically 19-24 nucleotides long. They function primarily to regulate gene expression and/or mRNA translation. Most plant microRNAs (miRNAs) have perfect or near-perfect complementarity with their target sequences. However, there are natural targets with up to five mismatches. They are processed from longer non-coding RNAs with characteristic fold-back structures by double-strand specific RNases of the Dicer family. Upon processing, they are incorporated in the RNA-induced silencing complex (RISC) by binding to its main component, an Argonaute protein. miRNAs serve as the specificity components of RISC, since they base-pair to target nucleic acids, mostly mRNAs, in the cytoplasm. Subsequent regulatory events include target mRNA cleavage and destruction and/or translational inhibition. Effects of miRNA overexpression are thus often reflected in decreased mRNA levels of target genes.

[0117] Artificial microRNAs (amiRNAs), which are typically 21 nucleotides in length, can be genetically engineered specifically to negatively regulate gene expression of single or multiple genes of interest. Determinants of plant microRNA target selection are well known in the art. Empirical parameters for target recognition have been defined and can be used to aid in the design of specific amiRNAs, (Schwab et al., Dev. Cell 8, 517-527, 2005). Convenient tools for design and generation of amiRNAs and their precursors are also available to the public (Schwab et al., Plant Cell 18, 1121-1133, 2006).

[0118] For optimal performance, the gene silencing techniques used for reducing expression in a plant of an endogenous gene requires the use of nucleic acid sequences from monocotyledonous plants for transformation of monocotyledonous plants, and from dicotyledonous plants for transformation of dicotyledonous plants. Preferably, a nucleic acid sequence from any given plant species is introduced into that same species. For example, a nucleic acid sequence from rice is transformed into a rice plant. However, it is not an absolute requirement that the nucleic acid sequence to be introduced originates from the same plant species as the plant in which it will be introduced. It is sufficient that there is substantial homology between the endogenous target gene and the nucleic acid to be introduced.

[0119] Described above are examples of various methods for the reduction or substantial elimination of expression in a plant of an endogenous gene. A person skilled in the art would readily be able to adapt the aforementioned methods for silencing so as to achieve reduction of expression of an endogenous gene in a whole plant or in parts thereof through the use of an appropriate promoter, for example.

### Selectable Marker (Gene)/Reporter Gene

[0120] “Selectable marker”, “selectable marker gene” or “reporter gene” includes any gene that confers a phenotype on a cell in which it is expressed to facilitate the identification and/or selection of cells that are transfected or transformed with a nucleic acid construct of the invention. These marker genes enable the identification of a successful transfer of the nucleic acid molecules via a series of different principles. Suitable markers may be selected from markers that confer antibiotic or herbicide resistance, that introduce a new metabolic trait or that allow visual selection. Examples of selectable marker genes include genes conferring resistance to antibiotics (such as nptII that phosphorylates neomycin and kanamycin, or hpt, phosphorylating hygromycin, or genes conferring resistance to, for example, bleomycin, streptomycin, tetracyclin, chloramphenicol, ampicillin, gentamycin, geneticin (G418), spectinomycin or blasticidin), to herbicides (for example bar which provides resistance to Basta®; aroA or gox providing resistance against glyphosate, or the genes conferring resistance to, for example, imidazolinone, phosphinothricin or sulfonylurea), or genes that provide a metabolic trait (such as manA that allows plants to use mannose as sole carbon source or xylose isomerase for the utilisation of xylose, or antinutritive markers such as the resistance to 2-deoxyglucose). Expression of visual marker genes results in the formation of colour (for example β-glucuronidase, GUS or β-galactosidase with its coloured substrates, for example X-Gal), luminescence (such as the luciferin/luceferase system) or fluorescence (Green Fluorescent Protein, GFP, and derivatives thereof). This list represents only a small number of possible markers. The skilled worker is familiar with such markers. Different markers are preferred, depending on the organism and the selection method.

[0121] It is known that upon stable or transient integration of nucleic acids into plant cells, only a minority of the cells takes up the foreign DNA and, if desired, integrates it into its genome, depending on the expression vector used and the transfection technique used. To identify and select these integrants, a gene coding for a selectable marker (such as the ones described above) is usually introduced into the host cells together with the gene of interest. These markers can for example be used in mutants in which these genes are not functional by, for example, deletion by conventional methods. Furthermore, nucleic acid molecules encoding a selectable marker can be introduced into a host cell on the same vector that comprises the sequence encoding the polypeptides of the invention or used in the methods of the invention, or else in a separate vector. Cells which have been stably transfected with the introduced nucleic acid can be identified for example by selection (for example, cells which have integrated the selectable marker survive whereas the other cells die). The marker genes may be removed or excised from the transgenic cell once they are no longer needed. Techniques for marker gene removal are known in the art, useful techniques are described above in the definitions section.

[0122] Since the marker genes, particularly genes for resistance to antibiotics and herbicides, are no longer required or are undesired in the transgenic host cell once the nucleic acids have been introduced successfully, the process according to the invention for introducing the nucleic acids advantageously employs techniques which enable the removal or excision of these marker genes. One such a method is what is known as co-transformation. The co-transformation method employs two vectors simultaneously for the transformation, one vector bearing the nucleic acid according to the invention and a second bearing the marker gene(s). A large proportion of transformants receives or, in the case of plants, comprises (up to 40% or more of the transformants), both vectors. In case of transformation with Agrobacteria, the transformants usually receive only a part of the vector, i.e. the sequence flanked by the T-DNA, which usually represents the expression cassette. The marker genes can subsequently be removed from the transformed plant by performing crosses. In another method, marker genes integrated into a transposon are used for the transformation together with desired nucleic acid (known as the Ac/Ds technology). The transformants can be crossed with a transposase source or the transformants are transformed with a nucleic acid construct conferring expression of a transposase, transiently or stable. In some cases (approx. 10%), the transposon jumps out of the genome of the host cell once transformation has taken place successfully and is lost. In a further number of cases, the transposon jumps to a different location. In these cases the marker gene must be eliminated by performing crosses. In microbiology, techniques were developed which make possible, or facilitate, the detection of such events. A further advantageous method relies on what is known as recombination systems; whose advantage is that elimination by crossing can be dispensed with. The best-known system of this type is what is known as the Cre/lox system. Cre1 is a recombinase that removes the sequences located between the loxP sequences. If the marker gene is integrated between the loxP sequences, it is removed once transformation has taken place successfully, by expression of the recombinase. Further recombination systems are the HIN/HIX, FLP/FRT and REP/STB system (Tribble et al., J. Biol. Chem., 275, 2000: 22255-22267; Velmurugan et al., J. Cell Biol., 149, 2000: 553-566). A site-specific integration into the plant genome of the nucleic acid sequences according to the invention is possible. Naturally, these methods can also be applied to microorganisms such as yeast, fungi or bacteria.

### Transgenic/Transgene/Recombinant

[0123] For the purposes of the invention, “transgenic”, “transgene” or “recombinant” means with regard to, for example, a nucleic acid sequence, an expression cassette, gene construct or a vector comprising the nucleic acid sequence or an organism transformed with the nucleic acid sequences, expression cassettes or vectors according to the invention, all those constructions brought about by recombinant methods in which either
[0124] (a) the nucleic acid sequences encoding proteins useful in the methods of the invention, or
[0125] (b) genetic control sequence(s) which is operably linked with the nucleic acid sequence according to the invention, for example a promoter, or
[0126] (c) a) and b)
   are not located in their natural genetic environment or have been modified by recombinant methods, it being possible for the modification to take the form of, for example, a substitution, addition, deletion, inversion or insertion of one or more nucleotide residues. The natural genetic environment is understood as meaning the natural genomic or chromosomal locus in the original plant or the presence in a genomic library. In the case of a genomic library, the natural genetic environment of the nucleic acid sequence is preferably retained, at least in part. The environment flanks the nucleic acid sequence at least on one side and has a sequence length of at least 50 bp, preferably at least 500 bp, especially preferably at least 1000 bp, most preferably at least 5000 bp. A naturally occurring expression cassette—for example the naturally occurring combination of the natural promoter of the nucleic acid sequences with the corresponding nucleic acid sequence encoding a polypeptide useful in the methods of the present invention, as defined above—becomes a transgenic expression cassette when this expression cassette is modified by non-natural, synthetic (“artificial”) methods such as, for example, mutagenic treatment. Suitable methods are described, for example, in U.S. Pat. No. 5,565,350 or WO 00/15815.

[0127] A transgenic plant for the purposes of the invention is thus understood as meaning, as above, that the nucleic acids used in the method of the invention are not at their natural locus in the genome of said plant, it being possible for the nucleic acids to be expressed homologously or heterologously. However, as mentioned, transgenic also means that, while the nucleic acids according to the invention or used in the inventive method are at their natural position in the genome of a plant, the sequence has been modified with regard to the natural sequence, and/or that the regulatory sequences of the natural sequences have been modified. Transgenic is preferably understood as meaning the expression of the nucleic acids according to the invention at an unnatural locus in the genome, i.e. homologous or, preferably, heterologous expression of the nucleic acids takes place. Preferred transgenic plants are mentioned herein.

### Transformation

[0128] The term “introduction” or “transformation” as referred to herein encompasses the transfer of an exogenous polynucleotide into a host cell, irrespective of the method used for transfer. Plant tissue capable of subsequent clonal propagation, whether by organogenesis or embryogenesis, may be transformed with a genetic construct of the present invention and a whole plant regenerated there from. The particular tissue chosen will vary depending on the clonal propagation systems available for, and best suited to, the particular species being transformed. Exemplary tissue targets include leaf disks, pollen, embryos, cotyledons, hypocotyls, megagametophytes, callus tissue, existing meristematic tissue (e.g., apical meristem, axillary buds, and root meristems), and induced meristem tissue (e.g., cotyledon meristem and hypocotyl meristem). The polynucleotide may be transiently or stably introduced into a host cell and may be maintained non-integrated, for example, as a plasmid. Alternatively, it may be integrated into the host genome. The resulting transformed plant cell may then be used to regenerate a transformed plant in a manner known to persons skilled in the art.

[0129] The transfer of foreign genes into the genome of a plant is called transformation. Transformation of plant species is now a fairly routine technique. Advantageously, any of several transformation methods may be used to introduce the gene of interest into a suitable ancestor cell. The methods described for the transformation and regeneration of plants from plant tissues or plant cells may be utilized for transient or for stable transformation. Transformation methods include the use of liposomes, electroporation, chemicals that increase free DNA uptake, injection of the DNA directly into the plant, particle gun bombardment, transformation using viruses or pollen and microprojection. Methods may be selected from the calcium/polyethylene glycol method for protoplasts (Krens, F. A. et al., (1982) Nature 296, 72-74; Negrutiu I et al. (1987) Plant Mol Biol 8: 363-373); electroporation of protoplasts (Shillito R. D. et al. (1985) Bio/Technol 3, 1099-1102); microinjection into plant material (Crossway A et al., (1986) Mol. Gen Genet 202: 179-185); DNA or RNA-coated particle bombardment (Klein T M et al., (1987) Nature 327: 70) infection with (non-integrative) viruses and the like. Transgenic plants, including transgenic crop plants, are preferably produced via Agrobacterium-mediated transformation. An advantageous transformation method is the transformation in planta. To this end, it is possible, for example, to allow the agrobacteria to act on plant seeds or to inoculate the plant meristem with agrobacteria. It has proved particularly expedient in accordance with the invention to allow a suspension of transformed agrobacteria to act on the intact plant or at least on the flower primordia. The plant is subsequently grown on until the seeds of the treated plant are obtained (Clough and Bent, Plant J. (1998) 16, 735-743). Methods for Agrobacterium-mediated transformation of rice include well known methods for rice transformation, such as those described in any of the following: European patent application EP 1198985 A1, Aldemita and Hodges (Planta 199: 612-617, 1996); Chan et al. (Plant Mol Biol 22 (3): 491-506, 1993), Hiei et al. (Plant J 6 (2): 271-282, 1994), which disclosures are incorporated by reference herein as if fully set forth. In the case of corn transformation, the preferred method is as described in either Ishida et al. (Nat. Biotechnol 14(6): 745-50, 1996) or Frame et al. (Plant Physiol 129(1): 13-22, 2002), which disclosures are incorporated by reference herein as if fully set forth. Said methods are further described by way of example in B. Jenes et al., Techniques for Gene Transfer, in: Transgenic Plants, Vol. 1, Engineering and Utilization, eds. S. D. Kung and R. Wu, Academic Press (1993) 128-143 and in Potrykus Annu. Rev. Plant Physiol. Plant Molec. Biol. 42 (1991) 205-225). The nucleic acids or the construct to be expressed is preferably cloned into a vector, which is suitable for transforming Agrobacterium tumefaciens, for example pBin19 (Bevan et al., Nucl. Acids Res. 12 (1984) 8711). Agrobacteria transformed by such a vector can then be used in known manner for the transformation of plants, such as plants used as a model, like Arabidopsis (Arabidopsis thaliana is within the scope of the present invention not considered as a crop plant), or crop plants such as, by way of example, tobacco plants, for example by immersing bruised leaves or chopped leaves in an agrobacterial solution and then culturing them in suitable media. The transformation of plants by means of Agrobacterium tumefaciens is described, for example, by Hofgen and Willmitzer in Nucl. Acid Res. (1988) 16, 9877 or is known inter alia from F. F. White, Vectors for Gene Transfer in Higher Plants; in Transgenic Plants, Vol. 1, Engineering and Utilization, eds. S. D. Kung and R. Wu, Academic Press, 1993, pp. 15-38.

[0130] In addition to the transformation of somatic cells, which then have to be regenerated into intact plants, it is also possible to transform the cells of plant meristems and in particular those cells which develop into gametes. In this case, the transformed gametes follow the natural plant development, giving rise to transgenic plants. Thus, for example, seeds of Arabidopsis are treated with agrobacteria and seeds are obtained from the developing plants of which a certain proportion is transformed and thus transgenic [Feldman, K A and Marks M D (1987). Mol Gen Genet 208:274-289; Feldmann K (1992). In: C Koncz, N-H Chua and J Shell, eds, Methods in Arabidopsis Research. Word Scientific, Singapore, pp. 274-289]. Alternative methods are based on the repeated removal of the inflorescences and incubation of the excision site in the center of the rosette with transformed agrobacteria, whereby transformed seeds can likewise be obtained at a later point in time (Chang (1994). Plant J. 5: 551-558; Katavic (1994). Mol Gen Genet, 245: 363-370). However, an especially effective method is the vacuum infiltration method with its modifications such as the “floral dip” method. In the case of vacuum infiltration of Arabidopsis, intact plants under reduced pressure are treated with an agrobacterial suspension [Bechthold, N (1993). C R Acad Sci Paris Life Sci, 316: 1194-1199], while in the case of the “floral dip” method the developing floral tissue is incubated briefly with a surfactant-treated agrobacterial suspension [Clough, S J and Bent A F (1998) The Plant J. 16, 735-743]. A certain proportion of transgenic seeds are harvested in both cases, and these seeds can be distinguished from non-transgenic seeds by growing under the above-described selective conditions. In addition the stable transformation of plastids is of advantages because plastids are inherited maternally is most crops reducing or eliminating the risk of transgene flow through pollen. The transformation of the chloroplast genome is generally achieved by a process which has been schematically displayed in Klaus et al., 2004 [Nature Biotechnology 22 (2), 225-229]. Briefly the sequences to be transformed are cloned together with a selectable marker gene between flanking sequences homologous to the chloroplast genome. These homologous flanking sequences direct site specific integration into the plastome. Plastidal transformation has been described for many different plant species and an overview is given in Bock (2001) Transgenic plastids in basic research and plant biotechnology. J Mol Biol. 2001 Sep. 21; 312 (3):425-38 or Maliga, P (2003) Progress towards commercialization of plastid transformation technology. Trends Biotechnol. 21, 20-28. Further biotechnological progress has recently been reported in form of marker free plastid transformants, which can be produced by a transient co-integrated maker gene (Klaus et al., 2004, Nature Biotechnology 22(2), 225-229).

### T-DNA Activation Tagging

[0131] T-DNA activation tagging (Hayashi et al. Science (1992) 1350-1353), involves insertion of T-DNA, usually containing a promoter (may also be a translation enhancer or an intron), in the genomic region of the gene of interest or 10 kb up- or downstream of the coding region of a gene in a configuration such that the promoter directs expression of the targeted gene. Typically, regulation of expression of the targeted gene by its natural promoter is disrupted and the gene falls under the control of the newly introduced promoter. The promoter is typically embedded in a T-DNA. This T-DNA is randomly inserted into the plant genome, for example, through Agrobacterium infection and leads to modified expression of genes near the inserted T-DNA. The resulting transgenic plants show dominant phenotypes due to modified expression of genes close to the introduced promoter.

### TILLING

[0132] The term “TILLING” is an abbreviation of “Targeted Induced Local Lesions In Genomes” and refers to a mutagenesis technology useful to generate and/or identify nucleic acids encoding proteins with modified expression and/or activity. TILLING also allows selection of plants carrying such mutant variants. These mutant variants may exhibit modified expression, either in strength or in location or in timing (if the mutations affect the promoter for example). These mutant variants may exhibit higher activity than that exhibited by the gene in its natural form. TILLING combines high-density mutagenesis with high-throughput screening methods. The steps typically followed in TILLING are: (a) EMS mutagenesis (Redei GP and Koncz C (1992) In Methods in Arabidopsis Research, Koncz C, Chua N H, Schell J, eds. Singapore, World Scientific Publishing Co, pp. 16-82; Feldmann et al., (1994) In Meyerowitz E M, Somerville C R, eds, Arabidopsis. Cold Spring Harbor Laboratory Press, Cold Spring Harbor, N.Y., pp 137-172; Lightner J and Caspar T (1998) In J Martinez-Zapater, J Salinas, eds, Methods on Molecular Biology, Vol. 82. Humana Press, Totowa, N.J., pp 91-104); (b) DNA preparation and pooling of individuals; (c) PCR amplification of a region of interest; (d) denaturation and annealing to allow formation of heteroduplexes; (e) DHPLC, where the presence of a heteroduplex in a pool is detected as an extra peak in the chromatogram; (f) identification of the mutant individual; and (g) sequencing of the mutant PCR product. Methods for TILLING are well known in the art (McCallum et al., (2000) Nat Biotechnol 18: 455-457; reviewed by Stemple (2004) Nat Rev Genet 5(2): 145-50).

### Homologous Recombination

[0133] Homologous recombination allows introduction in a genome of a selected nucleic acid at a defined selected position. Homologous recombination is a standard technology used routinely in biological sciences for lower organisms such as yeast or the moss Physcomitrella. Methods for performing homologous recombination in plants have been described not only for model plants (Offring a et al. (1990) EMBO J 9(10): 3077-84) but also for crop plants, for example rice (Terada et al. (2002) Nat Biotech 20(10): 1030-4; lida and Terada (2004) Curr Opin Biotech 15(2): 132-8), and approaches exist that are generally applicable regardless of the target organism (Miller et al, Nature Biotechnol. 25, 778-785, 2007).

### Yield

[0134] The term “yield” in general means a measurable produce of economic value, typically related to a specified crop, to an area, and to a period of time. Individual plant parts directly contribute to yield based on their number, size and/or weight, or the actual yield is the yield per square meter for a crop and year, which is determined by dividing total production (includes both harvested and appraised production) by planted square meters. The term “yield” of a plant may relate to vegetative biomass (root and/or shoot biomass), to reproductive organs, and/or to propagules (such as seeds) of that plant.

### Early Vigour

[0135] “Early vigour” refers to active healthy well-balanced growth especially during early stages of plant growth, and may result from increased plant fitness due to, for example, the plants being better adapted to their environment (i.e. optimizing the use of energy resources and partitioning between shoot and root). Plants having early vigour also show increased seedling survival and a better establishment of the crop, which often results in highly uniform fields (with the crop growing in uniform manner, i.e. with the majority of plants reaching the various stages of development at substantially the same time), and often better and higher yield. Therefore, early vigour may be determined by measuring various factors, such as thousand kernel weight, percentage germination, percentage emergence, seedling growth, seedling height, root length, root and shoot biomass and many more.

### Increase/Improve/Enhance

[0136] The terms “increase”, “improve” or “enhance” are interchangeable and shall mean in the sense of the application at least a 3%, 4%, 5%, 6%, 7%, 8%, 9% or 10%, preferably at least 15% or 20%, more preferably 25%, 30%, 35% or 40% more yield and/or growth in comparison to control plants as defined herein.

### Seed Yield

[0137] Increased seed yield may manifest itself as one or more of the following: a) an increase in seed biomass (total seed weight) which may be on an individual seed basis and/or per plant and/or per square meter; b) increased number of flowers per plant; c) increased number of (filled) seeds; d) increased seed filling rate (which is expressed as the ratio between the number of filled seeds divided by the total number of seeds); e) increased harvest index, which is expressed as a ratio of the yield of harvestable parts, such as seeds, divided by the total biomass; and f) increased thousand kernel weight (TKW), and g) increased number of primary panicles, which is extrapolated from the number of filled seeds counted and their total weight. An increased TKW may result from an increased seed size and/or seed weight, and may also result from an increase in embryo and/or endosperm size.

[0138] An increase in seed yield may also be manifested as an increase in seed size and/or seed volume. Furthermore, an increase in seed yield may also manifest itself as an increase in seed area and/or seed length and/or seed width and/or seed perimeter. Increased seed yield may also result in modified architecture, or may occur because of modified architecture.

### Greenness Index

[0139] The “greenness index” as used herein is calculated from digital images of plants. For each pixel belonging to the plant object on the image, the ratio of the green value versus the red value (in the RGB model for encoding color) is calculated. The greenness index is expressed as the percentage of pixels for which the green-to-red ratio exceeds a given threshold. Under normal growth conditions, under salt stress growth conditions, and under reduced nutrient availability growth conditions, the greenness index of plants is measured in the last imaging before flowering. In contrast, under drought stress growth conditions, the greenness index of plants is measured in the first imaging after drought.

### Plant

[0140] The term “plant” as used herein encompasses whole plants, ancestors and progeny of the plants and plant parts, including seeds, shoots, stems, leaves, roots (including tubers), flowers, and tissues and organs, wherein each of the aforementioned comprise the gene/nucleic acid of interest. The term “plant” also encompasses plant cells, suspension cultures, callus tissue, embryos, meristematic regions, gametophytes, sporophytes, pollen and microspores, again wherein each of the aforementioned comprises the gene/nucleic acid of interest.

[0141] Plants that are particularly useful in the methods of the invention include all plants which belong to the superfamily Viridiplantae, in particular monocotyledonous and dicotyledonous plants including fodder or forage legumes, ornamental plants, food crops, trees or shrubs selected from the list comprising Acer spp., Actinidia spp., Abelmoschus spp., Agave sisalana, Agropyron spp., Agrostis stolonifera, Allium spp., Amaranthus spp., Ammophila arenaria, Ananas comosus, Annona spp., Apium graveolens, Arachis spp, Artocarpus spp., Asparagus officinalis, Avena spp. (e.g. Avena sativa, Avena fatua, Avena byzantina, Avena fatua var. sativa, Avena hybrida), Averrhoa carambola, Bambusa sp., Benincasa hispida, Bertholletia excelsea, Beta vulgaris, Brassica spp. (e.g. Brassica napus, Brassica rapa ssp. [canola, oilseed rape, turnip rape]), Cadaba farinosa, Camellia sinensis, Canna indica, Cannabis sativa, Capsicum spp., Carex elata, Carica papaya, Carissa macrocarpa, Carya spp., Carthamus tinctorius, Castanea spp., Ceiba pentandra, Cichorium endivia, Cinnamomum spp., Citrullus lanatus, Citrus spp., Cocos spp., Coffea spp., Colocasia esculenta, Cola spp., Corchorus sp., Coriandrum sativum, Corylus spp., Crataegus spp., Crocus sativus, Cucurbita spp., Cucumis spp., Cynara spp., Daucus carota, Desmodium spp., Dimocarpus longan, Dioscorea spp., Diospyros spp., Echinochloa spp., Elaeis (e.g. Elaeis guineensis, Elaeis oleifera), Eleusine coracana, Eragrostis tef, Erianthus sp., Eriobotrya japonica, Eucalyptus sp., Eugenia uniflora, Fagopyrum spp., Fagus spp., Festuca arundinacea, Ficus carica, Fortunella spp., Fragaria spp., Ginkgo biloba, Glycine spp. (e.g. Glycine max, Soja hispida or Soja max), Gossypium hirsutum, Helianthus spp. (e.g. Helianthus annuus), Hemerocallis fulva, Hibiscus spp., Hordeum spp. (e.g. Hordeum vulgare), Ipomoea batatas, Juglans spp., Lactuca sativa, Lathyrus spp., Lens culinaris, Linum usitatissimum, Litchi chinensis, Lotus spp., Luffa acutangula, Lupinus spp., Luzula sylvatica, Lycopersicon spp. (e.g. Lycopersicon esculentum, Lycopersicon lycopersicum, Lycopersicon pyriforme), Macrotyloma spp., Malus spp., Malpighia emarginata, Mammea americana, Mangifera indica, Manihot spp., Manilkara zapota, Medicago sativa, Melilotus spp., Mentha spp., Miscanthus sinensis, Momordica spp., Morus nigra, Musa spp., Nicotiana spp., Olea spp., Opuntia spp., Ornithopus spp., Oryza spp. (e.g. Oryza sativa, Oryza latifolia), Panicum miliaceum, Panicum virgatum, Passiflora edulis, Pastinaca sativa, Pennisetum sp., Persea spp., Petroselinum crispum, Phalaris arundinacea, Phaseolus spp., Phleum pratense, Phoenix spp., Phragmites australis, Physalis spp., Pinus spp., Pistacia vera, Pisum spp., Poa spp., Populus spp., Prosopis spp., Prunus spp., Psidium spp., Punica granatum, Pyrus communis, Quercus spp., Raphanus sativus, Rheum rhabarbarum, Ribes spp., Ricinus communis, Rubus spp., Saccharum spp., Salix sp., Sambucus spp., Secale cereale, Sesamum spp., Sinapis sp., Solanum spp. (e.g. Solanum tuberosum, Solanum integrifolium or Solanum lycopersicum), Sorghum bicolor, Spinacia spp., Syzygium spp., Tagetes spp., Tamarindus indica, Theobroma cacao, Trifolium spp., Tripsacum dactyloides, Triticale sp., Triticosecale rimpaui, Triticum spp. (e.g. Triticum aestivum, Triticum durum, Triticum turgidum, Triticum hybernum, Triticum macha, Triticum sativum, Triticum monococcum or Triticum vulgare), Tropaeolum minus, Tropaeolum majus, Vaccinium spp., Vicia spp., Vigna spp., Viola odorata, Vitis spp., Zea mays, Zizania palustris, Ziziphus spp., amongst others.

### DETAILED DESCRIPTION OF THE INVENTION

[0142] Surprisingly, it has now been found that modulating expression in a plant of a nucleic acid encoding a CRSP33-like polypeptide gives plants having enhanced yield-related traits relative to control plants. According to a first embodiment, the present invention provides a method for enhancing yield-related traits in plants relative to control plants, comprising modulating expression in a plant of a nucleic acid encoding a CRSP33-like polypeptide and optionally selecting for plants having enhanced yield-related traits.

[0143] Furthermore, it has now surprisingly been found that modulating expression in a plant of a nucleic acid encoding an MCB polypeptide gives plants having enhanced yield-related traits relative to control plants. According to another embodiment, the present invention provides a method for enhancing yield-related traits in plants relative to control plants, comprising modulating expression in a plant of a nucleic acid encoding an MCB polypeptide and optionally selecting for plants having enhanced yield-related traits.

[0144] Furthermore, it has now surprisingly been found that modulating expression in a plant of a nucleic acid encoding a SRT2 polypeptide gives plants having enhanced yield-related traits relative to control plants. According to another embodiment, the present invention provides a method for enhancing yield-related traits in plants relative to control plants, comprising modulating expression in a plant of a nucleic acid encoding a SRT2 polypeptide and optionally selecting for plants having enhanced yield-related traits.

[0145] Furthermore, it has now surprisingly been found that modulating expression in a plant of a nucleic acid encoding a YRP2 polypeptide gives plants having enhanced abiotic stress tolerance relative to control plants. According to another embodiment, the present invention provides a method for enhancing tolerance to various abiotic stresses in plants relative to control plants, comprising modulating expression in a plant of a nucleic acid encoding a YRP2 polypeptide and optionally selecting for plants having enhanced tolerance to abiotic stress.

[0146] Furthermore, it has now surprisingly been found that modulating expression in a plant of a nucleic acid encoding a YRP3 polypeptide gives plants having enhanced abiotic stress tolerance relative to control plants. According to another embodiment, the present invention provides a method for enhancing tolerance to various abiotic stresses in plants relative to control plants, comprising modulating expression in a plant of a nucleic acid encoding a YRP3 polypeptide and optionally selecting for plants having enhanced tolerance to abiotic stress.

[0147] Furthermore, it has now surprisingly been found that modulating expression in a plant of a nucleic acid encoding a YRP4 polypeptide gives plants having enhanced abiotic stress tolerance relative to control plants. According to another embodiment, the present invention provides a method for enhancing tolerance to various abiotic stresses in plants relative to control plants, comprising modulating expression in a plant of a nucleic acid encoding a YRP4 polypeptide and optionally selecting for plants having enhanced tolerance to abiotic stress.

[0148] Furthermore, it has now surprisingly been found that modulating expression in a plant of a nucleic acid encoding a SPX-RING ((SYG/PHO81/XPR1-RING) polypeptide gives plants having enhanced yield-related traits relative to control plants. According to another embodiment, the present invention provides a method for enhancing yield-related traits in plants relative to control plants, comprising modulating expression in a plant of a nucleic acid encoding a SPX-RING polypeptide and optionally selecting for plants having enhanced yield-related traits.

[0149] A preferred method for modulating (preferably, increasing) expression of a nucleic acid encoding a CRSP33-like polypeptide, or an MCB polypeptide, or an SRT2 polypeptide, or a YRP2 polypeptide, or a YRP3 polypeptide, or a YRP4 polypeptide, or an SPX-RING polypeptide, is by introducing and expressing in a plant a nucleic acid encoding a CRSP33-like polypeptide, or an MCB polypeptide, or an SRT2 polypeptide, or a YRP2 polypeptide, or a YRP3 polypeptide, or a YRP4 polypeptide, or an SPX-RING polypeptide.

[0150] Concerning CRSP33-like polypeptides, any reference hereinafter to a “protein useful in the methods of the invention” is taken to mean a CRSP33-like polypeptide as defined herein. Any reference hereinafter to a “nucleic acid useful in the methods of the invention” is taken to mean a nucleic acid capable of encoding such a CRSP33-like polypeptide. The nucleic acid to be introduced into a plant (and therefore useful in performing the methods of the invention) is any nucleic acid encoding the type of protein which will now be described, hereafter also named “CRSP33-like nucleic acid” or “CRSP33-like gene”.

[0151] Concerning MCB polypeptides, any reference hereinafter to a “protein useful in the methods of the invention” is taken to mean an MCB polypeptide as defined herein. Any reference hereinafter to a “nucleic acid useful in the methods of the invention” is taken to mean a nucleic acid capable of encoding such an MCB polypeptide. The nucleic acid to be introduced into a plant (and therefore useful in performing the methods of the invention) is any nucleic acid encoding the type of protein which will now be described, hereafter also named “MCB nucleic acid” or “MCB gene”.

[0152] Concerning SRT2 polypeptides, any reference hereinafter to a “protein useful in the methods of the invention” is taken to mean a SRT2 polypeptide as defined herein. Any reference hereinafter to a “nucleic acid useful in the methods of the invention” is taken to mean a nucleic acid capable of encoding such a SRT2 polypeptide. The nucleic acid to be introduced into a plant (and therefore useful in performing the methods of the invention) is any nucleic acid encoding the type of protein which will now be described, hereafter also named “SRT2 nucleic acid” or “SRT2 gene”.

[0153] Concerning YRP2 polypeptides, any reference hereinafter to a “protein useful in the methods of the invention” is taken to mean a YRP2 polypeptide as defined herein. Any reference hereinafter to a “nucleic acid useful in the methods of the invention” is taken to mean a nucleic acid capable of encoding such a YRP2 polypeptide. The nucleic acid to be introduced into a plant (and therefore useful in performing the methods of the invention) is any nucleic acid encoding the type of protein which will now be described, hereafter also named “YRP2 nucleic acid” or “YRP2 gene”.

[0154] Concerning YRP3 polypeptides, any reference hereinafter to a “protein useful in the methods of the invention” is taken to mean a YRP3 polypeptide as defined herein. Any reference hereinafter to a “nucleic acid useful in the methods of the invention” is taken to mean a nucleic acid capable of encoding such a YRP3 polypeptide. The nucleic acid to be introduced into a plant (and therefore useful in performing the methods of the invention) is any nucleic acid encoding the type of protein which will now be described, hereafter also named “YRP3 nucleic acid” or “YRP3 gene”.

[0155] Concerning YRP4 polypeptides, any reference hereinafter to a “protein useful in the methods of the invention” is taken to mean a YRP4 polypeptide as defined herein. Any reference hereinafter to a “nucleic acid useful in the methods of the invention” is taken to mean a nucleic acid capable of encoding such a YRP4 polypeptide. The nucleic acid to be introduced into a plant (and therefore useful in performing the methods of the invention) is any nucleic acid encoding the type of protein which will now be described, hereafter also named “YRP4 nucleic acid” or “YRP4 gene”.

[0156] Concerning SPX-RING polypeptides, any reference hereinafter to a “protein useful in the methods of the invention” is taken to mean a SPX-RING polypeptide as defined herein. Any reference hereinafter to a “nucleic acid useful in the methods of the invention” is taken to mean a nucleic acid capable of encoding such a SPX-RING polypeptide. The nucleic acid to be introduced into a plant (and therefore useful in performing the methods of the invention) is any nucleic acid encoding the type of protein which will now be described, hereafter also named “SPX-RING nucleic acid” or “SPX-RING gene”.

[0157] A “CRSP33-like polypeptide” as defined herein refers to any polypeptide comprising any one or more of the following motifs:

[0158] Motif I: YPPPPPFYRLYK or a motif having in increasing order of preference a motif having at least 50%, 55%, 60%, 65%, 70%, 75%, 80%, 85%, 90%, 95% or more sequence identity to Motif I.

[0159] Motif II: QGVRQLYPKGP or a motif having in increasing order of preference a motif having at least 50%, 55%, 60%, 65%, 70%, 75%, 80%, 85%, 90%, 95% or more sequence identity to Motif II.

[0160] Motif III: LNRELQLHILELADVLVERPSQYARRVE or a motif having in increasing order of preference a motif having at least 50%, 55%, 60%, 65%, 70%, 75%, 80%, 85%, 90%, 95% or more sequence identity to Motif III.

[0161] Motif IV: IFKNLHHLLNSLRPHQARAT or a motif having in increasing order of preference a motif having at least 50%, 55%, 60%, 65%, 70%, 75%, 80%, 85%, 90%, 95% or more sequence identity to Motif IV.

[0162] Such CRSP33-like polypeptides as defined above typically additionally have in increasing order of preference at least 25%, 26%, 27%, 28%, 29%, 30%, 31%, 32%, 33%, 34%, 35%, 36%, 37%, 38%, 39%, 40%, 41%, 42%, 43%, 44%, 45%, 46%, 47%, 48%, 49%, 50%, 51%, 52%, 53%, 54%, 55%, 56%, 57%, 58%, 59%, 60%, 61%, 62%, 63%, 64%, 65%, 66%, 67%, 68%, 69%, 70%, 71%, 72%, 73%, 74%, 75%, 76%, 77%, 78%, 79%, 80%, 81%, 82%, 83%, 84%, 85%, 86%, 87%, 88%, 89%, 90%, 91%, 92%, 93%, 94%, 95%, 96%, 97%, 98%, or 99% overall sequence identity to the amino acid represented by SEQ ID NO: 2 or SEQ ID NO: 4.

[0163] The overall sequence identity is determined using a global alignment algorithm, such as the Needleman Wunsch algorithm in the program GAP (GCG Wisconsin Package, Accelrys), preferably with default parameters and preferably with sequences of mature proteins (i.e. without taking into account secretion signals or transit peptides). Compared to overall sequence identity, the sequence identity will generally be higher when only conserved domains or motifs are considered.

[0164] Preferably, the polypeptide sequence which when used in the construction of a phylogenetic tree, such as the one depicted in FIG. 2, clusters with the group of CRSP33-like polypeptides comprising the amino acid sequence represented by SEQ ID NO: 2 or SEQ ID NO: 4 rather than with any other group.

[0165] An “MCB polypeptide” as defined herein refers to any polypeptide comprising a sequence having in increasing order of preference at least 30%, 31%, 32%, 33%, 34%, 35%, 36%, 37%, 38%, 39%, 40%, 41%, 42%, 43%, 44%, 45%, 46%, 47%, 48%, 49%, 50%, 51%, 52%, 53%, 54%, 55%, 56%, 57%, 58%, 59%, 60%, 61%, 62%, 63%, 64%, 65%, 66%, 67%, 68%, 69%, 70%, 71%, 72%, 73%, 74%, 75%, 76%, 77%, 78%, 79%, 80%, 81%, 82%, 83%, 84%, 85%, 86%, 87%, 88%, 89%, 90%, 91%, 92%, 93%, 94%, 95%, 96%, 97%, 98%, or 99% overall sequence identity to any of the amino acid sequences of Table A2 preferably to any of the sequences in MCB1 group of Table A2, more preferably to the sequence represented by SEQ ID NO: 45.

[0166] In addition and preferably an MCB polypeptide refers to any polypeptide comprising at least one Myb_DNA-binding with any one of the following InterPro entry reference numbers (accession number) IPRO14778 (PFAM 00249) or IPRO01005 (also named SANT, DNA-binding) or IPRO06447 (also named Myb-like DNA-binding region, SHAQKYF class). Most preferably the Myb_DNA-binding protein domain comprises Motif 7 (SHAQKYF (SEQ ID NO: 194).

[0167] Myb DNA binding domains are well known in the art. Typically one or a multiplicity of Myb domains is present in Myb transcription factors (Yanhui et al. 2006).

[0168] Alternatively an MCB polypeptide according to the invention refers to any polypeptide comprising a Myb-DNA binding domain and capable of biding to the nucleic acid box TATCCAC and/or the box GATAAGATA when present within a plant promoter (a promoter capable of driving gene expression in a plant cell). The MCB polypeptide may also bind to a DNA fragment in increasing order of preference of at least 50, 60, 70, 80, 90, 100, 200, 300, 400, 500, 600, 700, 800, 900, 1000, 1500 nucleotides in length which comprises any one of both of the boxes represented by TATCCAC and GATAAGATA.

[0169] A further preferred polypeptide useful in the methods of the invention refers to an MCB polypeptide comprising a protein motif having in increasing order of preference at least 50%, 51%, 52%, 53%, 54%, 55%, 56%, 57%, 58%, 59%, 60%, 61%, 62%, 63%, 64%, 65%, 66%, 67%, 68%, 69%, 70%, 71%, 72%, 73%, 74%, 75%, 76%, 77%, 78%, 79%, 80%, 81%, 82%, 83%, 84%, 85%, 86%, 87%, 88%, 89%, 90%, 91%, 92%, 93%, 94%, 95%, 96%, 97%, 98%, or 99% sequence identity to any one or more of the following motifs:

(i) Motif 1:
(SEQ ID NO: 188)
WTEEEH[RK][KT]FL[AED]GL[ERK][QK]LGKGDWRGI[SA]K[NG]
ASHAQKYFLRQTN;
(ii) Motif 2:
(SEQ ID NO: 189)
P[GN][KM]KKRR[AS]SLFD[VM][GM][IPA][ARP][DEA][LGY]
[SHK][PD][ANTY];
(iii) Motif 3:
(SEQ ID NO: 190)
[GLA][AGS][LST][GMP]Q[QSL][KS][RG][RK]RR[KR]AQ[ED]
RKK[GA][IV]P;
(iv) Motif 4:
(SEQ ID NO: 191)
WTEEEHR[ML]FLLGLQKLGKGDWRGI[SA]RN[YF]V[VIT][ST]
RTPTQVASHAQKYFIRQ[ST]N;
(v) Motif 5:
(SEQ ID NO: 192)
[RK]RKRRSSLFD[MI]V[AP]D[ED];
(vi) Motif 6:
(SEQ ID NO: 193)
RRCSHC[SG][HN]NGHNSRT;
(vii) Motif 7:
(SEQ ID NO: 194)
SHAQKYF.

wherein amino acids between brackets represent alternative amino acids at the position.

[0170] More preferably the polypeptide useful in the invention is a homologue or an orthologue of any of the polypeptides in Table A2, even more preferably any one of the polypeptides of Table A2 most preferably the polypeptide represented by SEQ ID NO: 45.

[0171] Alternatively, the homologue of an MCB protein has in increasing order of preference at least 25%, 26%, 27%, 28%, 29%, 30%, 31%, 32%, 33%, 34%, 35%, 36%, 37%, 38%, 39%, 40%, 41%, 42%, 43%, 44%, 45%, 46%, 47%, 48%, 49%, 50%, 51%, 52%, 53%, 54%, 55%, 56%, 57%, 58%, 59%, 60%, 61%, 62%, 63%, 64%, 65%, 66%, 67%, 68%, 69%, 70%, 71%, 72%, 73%, 74%, 75%, 76%, 77%, 78%, 79%, 80%, 81%, 82%, 83%, 84%, 85%, 86%, 87%, 88%, 89%, 90%, 91%, 92%, 93%, 94%, 95%, 96%, 97%, 98%, or 99% overall sequence identity to the amino acid represented by SEQ ID NO: 45, provided that the homologous protein comprises one or more conserved motifs as outlined above. The overall sequence identity is determined using a global alignment algorithm, such as the Needleman Wunsch algorithm in the program GAP (GCG Wisconsin Package, Accelrys), preferably with default parameters and preferably with sequences of mature proteins (i.e. without taking into account secretion signals or transit peptides). Compared to overall sequence identity, the sequence identity will generally be higher when only conserved domains or motifs are considered. For local alignments, the Smith-Waterman algorithm is particularly useful (Smith T F, Waterman M S (1981) J. Mol. Biol 147(1); 195-7).

[0172] A “SRT2 polypeptide” as defined herein refers to any polypeptide having NAD1-dependent protein deacetylases activity. SRT2 or Sirtuin polypeptides are well characterized functionally and structurally (Hollender and Liu 2008). Typically, “SRT2 polypeptide” as defined herein comprises a SRT2 conserved domain of about 200 amino acids long having Pfam accession number PF2146.

[0173] The Pfam PF2146 domain is based around hidden Markov model (HMM) searches as provided by the HMMER2 package. In HMMER2, like BLAST, E-values (expectation values) are calculated. The E-value is the number of hits that would be expected to have a score equal or better than this by chance alone. A good E-value is much less than 1. Around 1 is what we expect just by chance. In principle, all you need to decide on the significance of a match is the E-value. Below are the domain scores that define the SRT2 domain as provided in the Pfam database.

| | HMM model | | | |
|---|---|---|---|---|
| | ls model | | fs model | |
| Parameter | Sequence | Domain Score | Sequence | Domain Score |
| Gathering | −95.0 | −95.0 | 16.6 | 16.6 |
| cut-off | | | | |
| Trusted cut-off | −90.7 | −90.7 | 17.5 | 16.6 |
| Noise cut-off | −99.9 | −99.9 | 15.8 | 16.2 |

[0174] The HMM model used to build the SRT2 domain is indicated. The order that the ls (global) and fs (fragment) matches are aligned to the model to give the full alignment. The build method can be global first, where ls matches are aligned first followed by fs matches that do not overlap, byscore, where matches are aligned in order of evalue score, or localfirst, where fs matches are aligned first followed by ls matches that do not overlap. The score of a single domain aligned to a HMM is indicated. If there is more than one domain, the sequence score is the sum of all the domain scores for that Pfam entry. If there is only a single domain, the sequence and the domains score for the protein will be identical.

[0175] The gathering cut-off used of the SRT2 domain is indicated. This value is the search threshold used to build the full alignment. The gathering cut-off is the minimum score a sequence must attain in order to belong the full alignment of a Pfam entry. For each Pfam HMM there are two cutoff values, a sequence cutoff and a domain cutoff.

[0176] The trusted cutoff refers to the bit scores of the lowest scoring match in the full alignment. The noise cutoff (NC) refers to the bit scores of the highest scoring match not in the full alignment.

[0177] A preferred SRT2 polypeptide useful in the methods of the invention refers to a polypeptide comprising a protein domain having in increasing order of preference at least 50%, 51%, 52%, 53%, 54%, 55%, 56%, 57%, 58%, 59%, 60%, 61%, 62%, 63%, 64%, 65%, 66%, 67%, 68%, 69%, 70%, 71%, 72%, 73%, 74%, 75%, 76%, 77%, 78%, 79%, 80%, 81%, 82%, 83%, 84%, 85%, 86%, 87%, 88%, 89%, 90%, 91%, 92%, 93%, 94%, 95%, 96%, 97%, 98%, or 99% overall sequence identity to any one or more of the amino acid domains set forth in Table C1.

[0178] Alternatively, the homologue of a SRT2 protein has in increasing order of preference at least 25%, 26%, 27%, 28%, 29%, 30%, 31%, 32%, 33%, 34%, 35%, 36%, 37%, 38%, 39%, 40%, 41%, 42%, 43%, 44%, 45%, 46%, 47%, 48%, 49%, 50%, 51%, 52%, 53%, 54%, 55%, 56%, 57%, 58%, 59%, 60%, 61%, 62%, 63%, 64%, 65%, 66%, 67%, 68%, 69%, 70%, 71%, 72%, 73%, 74%, 75%, 76%, 77%, 78%, 79%, 80%, 81%, 82%, 83%, 84%, 85%, 86%, 87%, 88%, 89%, 90%, 91%, 92%, 93%, 94%, 95%, 96%, 97%, 98%, or 99% overall sequence identity to the amino acid represented by SEQ ID NO: 199, provided that the homologous protein comprises the conserved motifs as outlined above.

[0179] The overall sequence identity is determined using a global alignment algorithm, such as the Needleman Wunsch algorithm in the program GAP (GCG Wisconsin Package, Accelrys), preferably with default parameters and preferably with sequences of mature proteins (i.e. without taking into account secretion signals or transit peptides). Compared to overall sequence identity, the sequence identity will generally be higher when only conserved domains or motifs are considered. For local alignments, the Smith-Waterman algorithm is particularly useful (Smith T F, Waterman M S (1981) J. Mol. Biol 147(1); 195-7).

[0180] Preferably, the SRT2 polypeptide useful in the methods of the invention refers to a polypeptide sequence which when used in the construction of a phylogenetic tree of all the 18 Arabidopsis HDAC polypeptides as described by Hollender and Lieu 2008 and listed below, clusters with SRT1 or SRT2 polypeptides which represent the SRT2 polypeptides of Arabidopsis thaliana, rather than with any other polypeptide.

[0181] List of the 18 Arabidopsis thaliana SRT2 proteins:

HDA19: (At4G38130.1)
HDA6: (At5G63110.1)
HDA7: (At5G35600.1)
HDA9: (At3G44680.1)
HDA5: (At5G61060.1)
HDA15: (At3G18520.1)
HDA18: (At5G61070.1)
HDA2: (At5G26040.1)
HAD8: (At1G08460.1)
HDA14: (At4G33470.1)
HDA10: (At3G44660.1)
HDA17: (At3G44490.1)
HDT1: (At3G44750.1)
HDT2: (At5G22650.1)
HDT3: (At5G03740.1)
HDT4: (At2G27840.1)
SRT1: (At5G55760.1)
SRT2: (At5G09230.1)

[0182] A “YRP2 polypeptide” as defined herein refers to any polypeptide comprising the sequences represented by any of SEQ ID NO: 236, SEQ ID NO: 238 and SEQ ID NO: 240 or orthologues and paralogues of any.

[0183] YRP2 polypeptides and orthologues and paralogues thereof typically have in increasing order of preference at least 25%, 26%, 27%, 28%, 29%, 30%, 31%, 32%, 33%, 34%, 35%, 36%, 37%, 38%, 39%, 40%, 41%, 42%, 43%, 44%, 45%, 46%, 47%, 48%, 49%, 50%, 51%, 52%, 53%, 54%, 55%, 56%, 57%, 58%, 59%, 60%, 61%, 62%, 63%, 64%, 65%, 66%, 67%, 68%, 69%, 70%, 71%, 72%, 73%, 74%, 75%, 76%, 77%, 78%, 79%, 80%, 81%, 82%, 83%, 84%, 85%, 86%, 87%, 88%, 89%, 90%, 91%, 92%, 93%, 94%, 95%, 96%, 97%, 98%, or 99% overall sequence identity to the amino acid represented by any of SEQ ID NO: 236, SEQ ID NO: 238 and SEQ ID NO: 240

[0184] The overall sequence identity is determined using a global alignment algorithm, such as the Needleman Wunsch algorithm in the program GAP (GCG Wisconsin Package, Accelrys), preferably with default parameters and preferably with sequences of mature proteins (i.e. without taking into account secretion signals or transit peptides). Compared to overall sequence identity, the sequence identity will generally be higher when only conserved domains or motifs are considered.

[0185] Preferably, the polypeptide sequence which when used in the construction of a phylogenetic tree, clusters with the group of YRP2 polypeptides comprising the amino acid sequences represented by SEQ ID NO: 236, SEQ ID NO: 238 and SEQ ID NO: 240 rather than with any other group. Tools and techniques for the construction and analysis of phylogenetic trees are well known in the art.

[0186] A “YRP3 polypeptide” as defined herein refers to any polypeptide comprising the sequences represented by any of SEQ ID NO: 245, SEQ ID NO: 247, SEQ ID NO: 249, SEQ ID NO: 251 SEQ ID NO: 253 and SEQ ID NO: 255 and orthologues or paralogues of any.

[0187] YRP3 polypeptides and orthologues and paralogues thereof typically have in increasing order of preference at least 25%, 26%, 27%, 28%, 29%, 30%, 31%, 32%, 33%, 34%, 35%, 36%, 37%, 38%, 39%, 40%, 41%, 42%, 43%, 44%, 45%, 46%, 47%, 48%, 49%, 50%, 51%, 52%, 53%, 54%, 55%, 56%, 57%, 58%, 59%, 60%, 61%, 62%, 63%, 64%, 65%, 66%, 67%, 68%, 69%, 70%, 71%, 72%, 73%, 74%, 75%, 76%, 77%, 78%, 79%, 80%, 81%, 82%, 83%, 84%, 85%, 86%, 87%, 88%, 89%, 90%, 91%, 92%, 93%, 94%, 95%, 96%, 97%, 98%, or 99% overall sequence identity to the amino acid represented by any of SEQ ID NO: 245, SEQ ID NO: 247, SEQ ID NO: 249, SEQ ID NO: 251, SEQ ID NO: 253 and SEQ ID NO: 255.

[0188] The overall sequence identity is determined using a global alignment algorithm, such as the Needleman Wunsch algorithm in the program GAP (GCG Wisconsin Package, Accelrys), preferably with default parameters and preferably with sequences of mature proteins (i.e. without taking into account secretion signals or transit peptides). Compared to overall sequence identity, the sequence identity will generally be higher when only conserved domains or motifs are considered.

[0189] Preferably, the polypeptide sequence which when used in the construction of a phylogenetic tree, clusters with the group of YRP3 polypeptides comprising the amino acid sequences represented by of SEQ ID NO: 245 SEQ ID NO: 247. SEQ ID NO: 249 SEQ ID NO: 251, SEQ ID NO: 253 and SEQ ID NO: 255. rather than with any other group. Tools and techniques for the construction and analysis of phylogenetic trees are well known in the art.

[0190] A “YRP4 polypeptide” as defined herein refers to any polypeptide comprising orthologues and paralogues of the sequences represented by any of SEQ ID NO: 262 and SEQ ID NO: 264

[0191] YRP4 polypeptides and orthologues and paralogues thereof typically have in increasing order of preference at least 25%, 26%, 27%, 28%, 29%, 30%, 31%, 32%, 33%, 34%, 35%, 36%, 37%, 38%, 39%, 40%, 41%, 42%, 43%, 44%, 45%, 46%, 47%, 48%, 49%, 50%, 51%, 52%, 53%, 54%, 55%, 56%, 57%, 58%, 59%, 60%, 61%, 62%, 63%, 64%, 65%, 66%, 67%, 68%, 69%, 70%, 71%, 72%, 73%, 74%, 75%, 76%, 77%, 78%, 79%, 80%, 81%, 82%, 83%, 84%, 85%, 86%, 87%, 88%, 89%, 90%, 91%, 92%, 93%, 94%, 95%, 96%, 97%, 98%, or 99% overall sequence identity to the amino acid represented by any of SEQ ID NO: 262 and SEQ ID NO: 264.

[0192] The overall sequence identity is determined using a global alignment algorithm, such as the Needleman Wunsch algorithm in the program GAP (GCG Wisconsin Package, Accelrys), preferably with default parameters and preferably with sequences of mature proteins (i.e. without taking into account secretion signals or transit peptides). Compared to overall sequence identity, the sequence identity will generally be higher when only conserved domains or motifs are considered.

[0193] Preferably, the polypeptide sequence which when used in the construction of a phylogenetic tree, clusters with the group of YRP4 polypeptides comprising the amino acid sequences represented by SEQ ID NO: 262 and SEQ IDI NO: 264. rather than with any other group. Tools and techniques for the construction and analysis of phylogenetic trees are well known in the art.

[0194] An “SPX-RING polypeptide” as defined herein refers to any polypeptide comprising an SPX (Pfam: PF03105) and a Zf-C3HC4 (Zinc Finger, RING-type) domain (Pfam: PF00097).

[0195] Preferably an SPX-RING polypeptide comprises a conserved domain having in increasing order of preference of at least 50%, 51%, 52%, 53%, 54%, 55%, 56%, 57%, 58%, 59%, 60%, 61%, 62%, 63%, 64%, 65%, 66%, 67%, 68%, 69%, 70%, 71%, 72%, 73%, 74%, 75%, 76%, 77%, 78%, 79%, 80%, 81%, 82%, 83%, 84%, 85%, 86%, 87%, 88%, 89%, 90%, 91%, 92%, 93%, 94%, 95%, 96%, 97%, 98%, or 99% overall sequence identity to any one or more of:
[0196] (i) a sequence as represented by amino acids 1 to 152 of SEQ ID NO: 271 (SPX domain in SEQ ID NO: 271);
[0197] (ii) a sequence as represented by amino acids 217 to 265 of SEQ ID NO: 271 (Zf-C3HC4 domain in SEQ ID NO: 271).

[0198] Further preferably an SPX-RING polypeptide useful in the methods of the invention comprises a motif having in increasing order of preference at least 50%, 51%, 52%, 53%, 54%, 55%, 56%, 57%, 58%, 59%, 60%, 61%, 62%, 63%, 64%, 65%, 66%, 67%, 68%, 69%, 70%, 71%, 72%, 73%, 74%, 75%, 76%, 77%, 78%, 79%, 80%, 81%, 82%, 83%, 84%, 85%, 86%, 87%, 88%, 89%, 90%, 91%, 92%, 93%, 94%, 95%, 96%, 97%, 98%, or 99% overall sequence identity to any one or more of:
[0199] (i) Motifs 1-1 to Motifs 1-35 (SEQ ID NO: 340 to 374); and
[0200] (ii) Motifs 2-1 to Motifs 2-35 (SEQ ID NO: 375 to 409); and
[0201] (iii) Motifs 3-1 to Motifs 3-35 (SEQ ID NO: 410 to 444).

[0202] Motifs 1-1 to Motifs 1-35 of Table D1 are conserved protein motifs comprised within the SPX domain of the polypeptides of Table A7. Motifs 3-1 to Motifs 2-35 of Table D1 are conserved protein motifs comprised within the Zf-C3HC4 domain of the polypeptides of Table A7

[0203] An SPX and a Zf-C3HC4 domain can be found in protein databases specialized in protein families, domains and functional sites such as Pfam (Finn et al. Nucleic Acids Research (2006) Database Issue 34:D247-D251) or InterPro which integrates the protein signature databases: PROSITE, PRINTS, Propom, Pfam, SMART, TIGRFAMs, PIRSF, SUPERFAMILY, Gene3D and PANTHER (Mulder et a1.2007 Nucleic Acids Research, 2007, Vol. 35, Database issue D224-D228). Pfam compiles a large collection of multiple sequence alignments and hidden Markov models (HMM) covering many common protein domains and families and is available through the Sanger Institute in the United Kingdom. Trusted matches as considered in the Pfam database are those sequences scoring higher than the gathering cut-off threshold. The gathering cutoff threshold of the Zf-C3HC4 domain (Pfam accession number: PF00097) in the Pfam HMM_fs method is 16.0 and in the Pfam HMM_ls method is 15.2. The gathering cutoff threshold of the SPX domain (Pfam accession number: PF00097) in the Pfam HMM_fs method is 20.0 and in the Pfam HMM_ls method is 25.0. However potential matches, comprising true Zf-C3HC4 domain domains, may still fall under the gathering cut-off. Alternatively, interpro scan may be used to determine the presence of an SPX and/or a Zf-C3HC4 domain in a polypeptide. Details on methods to perform an interpro scan or protein are provided in the Examples section.

[0204] Alternatively, an SPX and a Zf-C3HC4 domain in a polypeptide may be identified by performing a sequence comparison with known polypeptides comprising such domains and establishing the similarity in the region of said domains. The sequences may be aligned using any of the methods well known in the art such as Blast algorithms. The probability for the alignment to occur with a given sequence is taken as basis for identifying similar polypeptides. A parameter that is typically used to represent such probability is called e-value. The E-value is a measure of the reliability of the S score. The S score is a measure of the similarity of the query to the sequence shown. The e-value describes how often a given S score is expected to occur at random. The e-value cut-off may be as high as 1.0. The typical threshold for a trusted e-value from a BLAST search output using an SPX-RING polypeptide as query sequence is lower than 1.e-10, 1.e-15, 1.e-20, 1.e-25, 1.e-50, 1.e-75, 1.e-100, 1.e-200, 1.e-300, 1.e-400, 1.e-500, 1.e-600, 1.e-700 and 1.e-800. Preferably SPX-RING polypeptides useful in the methods of the invention comprise a sequence having in increasing order of preference an e-value lower than 1.e-10, 1.e-15, 1.e-20, 1.e-25, 1.e-50, 1.e-75, 1.e-100, 1.e-200, 1.e-300, 1.e-400, 1.e-500, 1.e-600, 1.e-700 and 1.e-800 in an alignment with an SPX and a Zf-C3HC4 domain as found in a known SPX-RING polypeptide, such as for example SEQ ID NO: 271.

[0205] Alternatively, the homologue of a SPX-RING protein has in increasing order of preference at least 25%, 26%, 27%, 28%, 29%, 30%, 31%, 32%, 33%, 34%, 35%, 36%, 37%, 38%, 39%, 40%, 41%, 42%, 43%, 44%, 45%, 46%, 47%, 48%, 49%, 50%, 51%, 52%, 53%, 54%, 55%, 56%, 57%, 58%, 59%, 60%, 61%, 62%, 63%, 64%, 65%, 66%, 67%, 68%, 69%, 70%, 71%, 72%, 73%, 74%, 75%, 76%, 77%, 78%, 79%, 80%, 81%, 82%, 83%, 84%, 85%, 86%, 87%, 88%, 89%, 90%, 91%, 92%, 93%, 94%, 95%, 96%, 97%, 98%, or 99% overall sequence identity to the amino acid represented by SEQ ID NO: 271, provided that the homologous protein comprises the conserved motifs as outlined above. The overall sequence identity is determined using a global alignment algorithm, such as the Needleman Wunsch algorithm in the program GAP (GCG Wisconsin Package, Accelrys), preferably with default parameters and preferably with sequences of mature proteins (i.e. without taking into account secretion signals or transit peptides). Compared to overall sequence identity, the sequence identity will generally be higher when only conserved domains or motifs are considered. For local alignments, the Smith-Waterman algorithm is particularly useful (Smith T F, Waterman M S (1981) J. Mol. Biol 147(1); 195-7).

[0206] The terms “domain”, “signature” and “motif” are defined in the “definitions” section herein. Specialist databases exist for the identification of domains, for example, SMART (Schultz et al. (1998) Proc. Natl. Acad. Sci. USA 95, 5857-5864; Letunic et al. (2002) Nucleic Acids Res 30, 242-244), InterPro (Mulder et al., (2003) Nucl. Acids. Res. 31, 315-318), Prosite (Bucher and Bairoch (1994), A generalized profile syntax for biomolecular sequences motifs and its function in automatic sequence interpretation. (In) ISMB-94; Proceedings 2nd International Conference on Intelligent Systems for Molecular Biology. Altman R., Brutlag D., Karp P., Lathrop R., Searls D., Eds., pp 53-61, AAAI Press, Menlo Park; Hulo et al., Nucl. Acids. Res. 32:D134-D137, (2004)), or Pfam (Bateman et al., Nucleic Acids Research 30(1): 276-280 (2002)). A set of tools for in silico analysis of protein sequences is available on the ExPASy proteomics server (Swiss Institute of Bioinformatics (Gasteiger et al., ExPASy: the proteomics server for in-depth protein knowledge and analysis, Nucleic Acids Res. 31:3784-3788 (2003)). Domains or motifs may also be identified using routine techniques, such as by sequence alignment.

[0207] Methods for the alignment of sequences for comparison are well known in the art, such methods include GAP, BESTFIT, BLAST, FASTA and TFASTA. GAP uses the algorithm of Needleman and Wunsch ((1970) J Mol Biol 48: 443-453) to find the global (i.e. spanning the complete sequences) alignment of two sequences that maximizes the number of matches and minimizes the number of gaps. The BLAST algorithm (Altschul et al. (1990) Mol Biol 215: 403-10) calculates percent sequence identity and performs a statistical analysis of the similarity between the two sequences. The software for performing BLAST analysis is publicly available through the National Centre for Biotechnology Information (NCBI). Homologues may readily be identified using, for example, the ClustalW multiple sequence alignment algorithm (version 1.83), with the default pairwise alignment parameters, and a scoring method in percentage. Global percentages of similarity and identity may also be determined using one of the methods available in the MatGAT software package (Campanella et al., BMC Bioinformatics. 2003 Jul. 10; 4:29. MatGAT: an application that generates similarity/identity matrices using protein or DNA sequences.). Minor manual editing may be performed to optimise alignment between conserved motifs, as would be apparent to a person skilled in the art. Furthermore, instead of using full-length sequences for the identification of homologues, specific domains may also be used. The sequence identity values may be determined over the entire nucleic acid or amino acid sequence or over selected domains or conserved motif(s), using the programs mentioned above using the default parameters. For local alignments, the Smith-Waterman algorithm is particularly useful (Smith T F, Waterman M S (1981) J. Mol. Biol 147(1); 195-7).

[0208] Furthermore, MCB polypeptides typically have DNA biding activity. Tools and techniques for measuring DNA biding activity are well known in the art. Preferred methods are as described by Rose et al. 1999 Plant journal 20, 641-645; and/or by Rubio-Somoza, The Plant Journal (2006) 45, 17-30.

[0209] In addition, MCB polypeptides, when expressed in rice according to the methods of the present invention as outlined in the Examples section, give plants having increased yield related traits, in particular any one or more selected from an increased in the seed weight of the plant, increased seed filling rate, increased harvest index and increased number of filled seeds.

[0210] Furthermore, SRT2 polypeptides (at least in their native form) typically have Histone Deacetylase activity. Tools and techniques for measuring Histone Deacetylase activity are well known in the art (Hollender and Liu 2008).

[0211] In addition, SRT2 polypeptides, when expressed in rice according to the methods of the present invention as outlined in the Examples section give plants having increased yield related traits, in particular any one of the following: increased green biomass, increased emergence vigour (seedling vigour), increased total weight of the seed per plant, increased number of filled seeds, increased number of flowers per panicle, increased number of total seed, and increased drought tolerance.

[0212] Furthermore, SPX-RING polypeptides, when expressed in rice according to the methods of the present invention as outlined in Examples 7 and 8, give plants having increased yield related traits selected from increased total seed weight, increased harvest index and increased seed filing rate.

[0213] Additionally, SPX-RING polypeptides may display a preferred subcellular localization, typically one or more of nuclear, cytoplasmic, chloroplastic, or mitochondrial.

[0214] The task of protein subcellular localisation prediction is important and well studied. Knowing a protein's localisation helps elucidate its function. Experimental methods for protein localization range from immunolocalization to tagging of proteins using green fluorescent protein (GFP) or beta-glucuronidase (GUS). Such methods are accurate although labor-intensive compared with computational methods. Recently much progress has been made in computational prediction of protein localisation from sequence data. Among algorithms well known to a person skilled in the art are available at the ExPASy Proteomics tools hosted by the Swiss Institute for Bioinformatics, for example, PSort, TargetP, ChloroP, LocTree, Predotar, LipoP, MITOPROT, PATS, PTS1, SignalP, TMHMM, and others.

[0215] CRSP33-like polypeptides as defined herein, when expressed in plants, especially rice according to the methods of the present invention as outlined in the Examples section herein, give plants having increased yield related traits.

[0216] YRP2 polypeptides, or YRP3 polypeptides, or YRP4 polypeptides, when expressed in plants, in particular in rice plants, confer enhanced tolerance to abiotic stresses to those plants.

[0217] Concerning CRSP33-like polypeptides, the present invention is illustrated by transforming plants with the nucleic acid sequence represented by SEQ ID NO: 1, encoding the polypeptide sequence of SEQ ID NO: 2. However, performance of the invention is not restricted to these sequences; the methods of the invention may advantageously be performed using any CRSP33-like-encoding nucleic acid or CRSP33-like polypeptide as defined herein.

[0218] Examples of nucleic acids encoding CRSP33-like polypeptides are given in Table A1 of the Examples section herein. Such nucleic acids are useful in performing the methods of the invention. The amino acid sequences given in Table A1 of the Examples section are example sequences of orthologues and paralogues of the CRSP33-like polypeptide represented by SEQ ID NO: 2, the terms “orthologues” and “paralogues” being as defined herein. Further orthologues and paralogues may readily be identified by performing a so-called reciprocal blast search. Typically, this involves a first BLAST involving BLASTing a query sequence (for example using any of the sequences listed in Table A1 of the Examples section) against any sequence database, such as the publicly available NCBI database. BLASTN or TBLASTX (using standard default values) are generally used when starting from a nucleotide sequence, and BLASTP or TBLASTN (using standard default values) when starting from a protein sequence. The BLAST results may optionally be filtered. The full-length sequences of either the filtered results or non-filtered results are then BLASTed back (second BLAST) against sequences from the organism from which the query sequence is derived (where the query sequence is SEQ ID NO: 1 or SEQ ID NO: 2, the second BLAST would therefore be against Lycopersicon esculentum sequences). The results of the first and second BLASTs are then compared. A paralogue is identified if a high-ranking hit from the first blast is from the same species as from which the query sequence is derived, a BLAST back then ideally results in the query sequence amongst the highest hits; an orthologue is identified if a high-ranking hit in the first BLAST is not from the same species as from which the query sequence is derived, and preferably results upon BLAST back in the query sequence being among the highest hits.

[0219] Concerning MCB polypeptides, the present invention is illustrated by transforming plants with the nucleic acid sequence represented by SEQ ID NO 44, encoding the polypeptide sequence of SEQ ID NO: 45. However, performance of the invention is not restricted to these sequences; the methods of the invention may advantageously be performed using any MCB-encoding nucleic acid or MCB polypeptide as defined herein.

[0220] Examples of nucleic acids encoding MCB polypeptides are given in Table A2 of the Examples section herein. Such nucleic acids are useful in performing the methods of the invention. The amino acid sequences given in Table A2 of the Examples section are example sequences of orthologues and paralogues of the MCB polypeptide represented by SEQ ID NO: 45, the terms “orthologues” and “paralogues” being as defined herein. Further orthologues and paralogues may readily be identified by performing a so-called reciprocal blast search. Typically, this involves a first BLAST involving BLASTing a query sequence (for example using any of the sequences listed in Table A2 of the Examples section) against any sequence database, such as the publicly available NCBI database. BLASTN or TBLASTX (using standard default values) are generally used when starting from a nucleotide sequence, and BLASTP or TBLASTN (using standard default values) when starting from a protein sequence. The BLAST results may optionally be filtered. The full-length sequences of either the filtered results or non-filtered results are then BLASTed back (second BLAST) against sequences from the organism from which the query sequence is derived (where the query sequence is SEQ ID NO: 44 or SEQ ID NO: 45, the second BLAST would therefore be against wheat sequences). The results of the first and second BLASTs are then compared. A paralogue is identified if a high-ranking hit from the first blast is from the same species as from which the query sequence is derived, a BLAST back then ideally results in the query sequence amongst the highest hits; an orthologue is identified if a high-ranking hit in the first BLAST is not from the same species as from which the query sequence is derived, and preferably results upon BLAST back in the query sequence being among the highest hits.

[0221] Concerning SRT2 polypeptides, the present invention is illustrated by transforming plants with the nucleic acid sequence represented by SEQ ID NO: 198, encoding the polypeptide sequence of SEQ ID NO: 199. However, performance of the invention is not restricted to these sequences; the methods of the invention may advantageously be performed using any SRT2-encoding nucleic acid or SRT2 polypeptide as defined herein.

[0222] Examples of nucleic acids encoding SRT2 polypeptides are given in Table A3 of the Examples section herein. Such nucleic acids are useful in performing the methods of the invention. The amino acid sequences given in Table A3 of the Examples section are example sequences of orthologues and paralogues of the SRT2 polypeptide represented by SEQ ID NO: 199, the terms “orthologues” and “paralogues” being as defined herein. Further orthologues and paralogues may readily be identified by performing a so-called reciprocal blast search. Typically, this involves a first BLAST involving BLASTing a query sequence (for example using any of the sequences listed in Table A3 of the Examples section) against any sequence database, such as the publicly available NCBI database. BLASTN or TBLASTX (using standard default values) are generally used when starting from a nucleotide sequence, and BLASTP or TBLASTN (using standard default values) when starting from a protein sequence. The BLAST results may optionally be filtered. The full-length sequences of either the filtered results or non-filtered results are then BLASTed back (second BLAST) against sequences from the organism from which the query sequence is derived (where the query sequence is SEQ ID NO: 198 or SEQ ID NO: 199 the second BLAST would therefore be against rice sequences). The results of the first and second BLASTs are then compared. A paralogue is identified if a high-ranking hit from the first blast is from the same species as from which the query sequence is derived, a BLAST back then ideally results in the query sequence amongst the highest hits; an orthologue is identified if a high-ranking hit in the first BLAST is not from the same species as from which the query sequence is derived, and preferably results upon BLAST back in the query sequence being among the highest hits.

[0223] Concerning YRP2 polypeptides, the present invention may be performed, for example, by transforming plants with the nucleic acid sequence represented by any of SEQ ID NO: 235 encoding the polypeptide sequence of SEQ ID NO: 236, or SEQ ID NO: 237 encoding the polypeptide sequence of SEQ ID NO: 238, or SEQ ID NO: 239 encoding the polypeptide sequence of SEQ ID NO: 240. However, performance of the invention is not restricted to these sequences; the methods of the invention may advantageously be performed using any YRP2-encoding nucleic acid or YRP2 polypeptide as defined herein.

[0224] Examples of nucleic acids encoding YRP2 polypeptides are given in Table A4 of the Examples section herein. Such nucleic acids are useful in performing the methods of the invention. Orthologues and paralogues of the amino acid sequences given in Table A4 may be readily obtained using routine tools and techniques, such as a reciprocal blast search. Typically, this involves a first BLAST involving BLASTing a query sequence (for example using any of the sequences listed in Table A4 of the Examples section) against any sequence database, such as the publicly available NCBI database. BLASTN or TBLASTX (using standard default values) are generally used when starting from a nucleotide sequence, and BLASTP or TBLASTN (using standard default values) when starting from a protein sequence. The BLAST results may optionally be filtered. The full-length sequences of either the filtered results or non-filtered results are then BLASTed back (second BLAST) against sequences from the organism from which the query sequence is derived (where the query sequence is SEQ ID NO: 235 or SEQ ID NO: 236 the second BLAST would therefore be against Solanum lycopersicum sequences; where the query sequence is SEQ ID NO: 237 or SEQ ID NO: 238, the second BLAST would therefore be against Physcomitrella patens; sequences where the query sequence is SEQ ID NO: or SEQ ID NO: 240 the second BLAST would therefore be against Glycine max sequences). The results of the first and second BLASTs are then compared. A paralogue is identified if a high-ranking hit from the first blast is from the same species as from which the query sequence is derived, a BLAST back then ideally results in the query sequence amongst the highest hits; an orthologue is identified if a high-ranking hit in the first BLAST is not from the same species as from which the query sequence is derived, and preferably results upon BLAST back in the query sequence being among the highest hits.

[0225] Concerning YRP3 polypeptides, the present invention may be performed, for example, by transforming plants with the nucleic acid sequence represented by any of SEQ ID NO: 244 encoding the polypeptide sequence of SEQ ID NO: 245, or SEQ ID NO: 246 encoding the polypeptide sequence of SEQ ID NO: 247, or SEQ ID NO: 248 encoding the polypeptide sequence of SEQ ID NO: 249, or SEQ ID NO: 250 encoding the polypeptide sequence of SEQ ID NO: 251, or SEQ ID NO: 252 encoding the polypeptide sequence of SEC) ID NO: 253, or SEQ ID NO: 254 encoding the polypeptide sequence of SEQ ID NO: 255. However, performance of the invention is not restricted to these sequences; the methods of the invention may advantageously be performed using any YRP3-encoding nucleic acid or YRP3 polypeptide as defined herein.

[0226] Examples of nucleic acids encoding YRP3 polypeptides are given in Table A5 of the Examples section herein. Such nucleic acids are useful in performing the methods of the invention. Orthologues and paralogues of the amino acid sequences given in Table A5 may be readily obtained using routine tools and techniques, such as a reciprocal blast search. Typically, this involves a first BLAST involving BLASTing a query sequence (for example using any of the sequences listed in Table A5 of the Examples section) against any sequence database, such as the publicly available NCBI database. BLASTN or TBLASTX (using standard default values) are generally used when starting from a nucleotide sequence, and BLASTP or TBLASTN (using standard default values) when starting from a protein sequence. The BLAST results may optionally be filtered. The full-length sequences of either the filtered results or non-filtered results are then BLASTed back (second BLAST) against sequences from the organism from which the query sequence is derived (where the query sequence is SEQ ID NO: 244 or SEQ ID NO: 245, the second BLAST would therefore be against Physomitrella patens sequences; where the query sequence is SEQ ID NO: 246 or SEQ ID NO: 247, the second BLAST would therefore be against Physcomitrella patens; where the query sequence is SEQ ID NO: 248 or SEC) ID NO: 249, the second BLAST would therefore be against Populus trichocarpa sequences; where the query sequence is SEC) ID NO:250 or SEC) ID NO: 251, the second BLAST would therefore be against Populus trichocarpa sequences; where the query sequence is SEQ ID NO: 252 or SEQ ID NO: 253, the second BLAST would therefore be against Oryza sativa sequences; where the query sequence is SEQ ID NO: 254 or SEQ ID NO: 255, the second BLAST would therefore be against Oryza sativa sequences). The results of the first and second BLASTs are then compared. A paralogue is identified if a high-ranking hit from the first blast is from the same species as from which the query sequence is derived, a BLAST back then ideally results in the query sequence amongst the highest hits; an orthologue is identified if a high-ranking hit in the first BLAST is not from the same species as from which the query sequence is derived, and preferably results upon BLAST back in the query sequence being among the highest hits.

[0227] Concerning YRP4 polypeptides, the present invention may be performed, for example, by transforming plants with the nucleic acid sequence represented by any of SEQ ID NO: 261 encoding the polypeptide sequence of SEQ ID NO: 262, or SEQ ID NO: 263 encoding the polypeptide sequence of SEQ ID NO: 264. However, performance of the invention is not restricted to these sequences; the methods of the invention may advantageously be performed using any YRP4-encoding nucleic acid or YRP4 polypeptide as defined herein.

[0228] Examples of nucleic acids encoding YRP4 polypeptides are given in Table A6 of the Examples section herein. Such nucleic acids are useful in performing the methods of the invention. Orthologues and paralogues of the amino acid sequences given in Table A6 may be readily obtained using routine tools and techniques, such as a reciprocal blast search. Typically, this involves a first BLAST involving BLASTing a query sequence (for example using any of the sequences listed in Table A6 of the Examples section) against any sequence database, such as the publicly available NCBI database. BLASTN or TBLASTX (using standard default values) are generally used when starting from a nucleotide sequence, and BLASTP or TBLASTN (using standard default values) when starting from a protein sequence. The BLAST results may optionally be filtered. The full-length sequences of either the filtered results or non-filtered results are then BLASTed back (second BLAST) against sequences from the organism from which the query sequence is derived (where the query sequence is SEQ ID NO: 261 or SEQ ID NO: 262, the second BLAST would therefore be against Triticum aestivum sequences; where the query sequence is SEQ ID NO: 263 or SEQ ID NO: 264, the second BLAST would therefore be against Solanum lycopersicum). The results of the first and second BLASTs are then compared. A paralogue is identified if a high-ranking hit from the first blast is from the same species as from which the query sequence is derived, a BLAST back then ideally results in the query sequence amongst the highest hits; an orthologue is identified if a high-ranking hit in the first BLAST is not from the same species as from which the query sequence is derived, and preferably results upon BLAST back in the query sequence being among the highest hits.

[0229] Concerning SPX-RING polypeptides, the present invention is illustrated by transforming plants with the nucleic acid sequence represented by SEQ ID NO: 270, encoding the polypeptide sequence of SEQ ID NO: 271. However, performance of the invention is not restricted to these sequences; the methods of the invention may advantageously be performed using any SPX-RING-encoding nucleic acid or SPX-RING polypeptide as defined herein.

[0230] Examples of nucleic acids encoding SPX-RING polypeptides are given in Table A7 of the Examples section herein. Such nucleic acids are useful in performing the methods of the invention. The amino acid sequences given in Table A7 of the Examples section are example sequences of orthologues and paralogues of the SPX-RING polypeptide represented by SEQ ID NO: 271, the terms “orthologues” and “paralogues” being as defined herein. Further orthologues and paralogues may readily be identified by performing a so-called reciprocal blast search. Typically, this involves a first BLAST involving BLASTing a query sequence (for example using any of the sequences listed in Table A7 of the Examples section) against any sequence database, such as the publicly available NCBI database. BLASTN or TBLASTX (using standard default values) are generally used when starting from a nucleotide sequence, and BLASTP or TBLASTN (using standard default values) when starting from a protein sequence. The BLAST results may optionally be filtered. The full-length sequences of either the filtered results or non-filtered results are then BLASTed back (second BLAST) against sequences from the organism from which the query sequence is derived (where the query sequence is SEQ ID NO: 270 or SEQ ID NO: 271, the second BLAST would therefore be against rice sequences). The results of the first and second BLASTs are then compared. A paralogue is identified if a high-ranking hit from the first blast is from the same species as from which the query sequence is derived, a BLAST back then ideally results in the query sequence amongst the highest hits; an orthologue is identified if a high-ranking hit in the first BLAST is not from the same species as from which the query sequence is derived, and preferably results upon BLAST back in the query sequence being among the highest hits.

[0231] High-ranking hits are those having a low E-value. The lower the E-value, the more significant the score (or in other words the lower the chance that the hit was found by chance). Computation of the E-value is well known in the art. In addition to E-values, comparisons are also scored by percentage identity. Percentage identity refers to the number of identical nucleotides (or amino acids) between the two compared nucleic acid (or polypeptide) sequences over a particular length. In the case of large families, ClustalW may be used, followed by a neighbour joining tree, to help visualize clustering of related genes and to identify orthologues and paralogues.

[0232] Nucleic acid variants may also be useful in practising the methods of the invention. Examples of such variants include nucleic acids encoding homologues and derivatives of any one of the amino acid sequences given in Table A1 to A7 of the Examples section, the terms “homologue” and “derivative” being as defined herein. Also useful in the methods of the invention are nucleic acids encoding homologues and derivatives of orthologues or paralogues of any one of the amino acid sequences given in Table A1 to A7 of the Examples section. Homologues and derivatives useful in the methods of the present invention have substantially the same biological and functional activity as the unmodified protein from which they are derived.

[0233] Further nucleic acid variants useful in practising the methods of the invention include portions of nucleic acids encoding CRSP33-like polypeptides, or MCB polypeptides, or SRT2 polypeptides, or YRP2 polypeptides, or YRP3 polypeptides, or YRP4 polypeptides, or SPX-RING polypeptides, nucleic acids hybridising to nucleic acids encoding CRSP33-like polypeptides, or MCB polypeptides, or SRT2 polypeptides, or YRP2 polypeptides, or YRP3 polypeptides, or YRP4 polypeptides, or SPX-RING polypeptides, splice variants of nucleic acids encoding CRSP33-like polypeptides, or MCB polypeptides, or SRT2 polypeptides, or YRP2 polypeptides, or YRP3 polypeptides, or YRP4 polypeptides, or SPX-RING polypeptides, allelic variants of nucleic acids encoding CRSP33-like polypeptides, or MCB polypeptides, or SRT2 polypeptides, or YRP2 polypeptides, or YRP3 polypeptides, or YRP4 polypeptides, or SPX-RING polypeptides, and variants of nucleic acids encoding CRSP33-like polypeptides, or MCB polypeptides, or SRT2 polypeptides, or YRP2 polypeptides, or YRP3 polypeptides, or YRP4 polypeptides, or SPX-RING polypeptides, obtained by gene shuffling. The terms hybridising sequence, splice variant, allelic variant and gene shuffling are as described herein.

[0234] Nucleic acids encoding CRSP33-like polypeptides, or MCB polypeptides, or SRT2 polypeptides, or YRP2 polypeptides, or YRP3 polypeptides, or YRP4 polypeptides, or SPX-RING polypeptides, need not be full-length nucleic acids, since performance of the methods of the invention does not rely on the use of full-length nucleic acid sequences. According to the present invention, there is provided a method for enhancing yield-related traits and/or abiotic stress tolerance in plants, comprising introducing and expressing in a plant a portion of any one of the nucleic acid sequences given in Table A1 to A7 of the Examples section, or a portion of a nucleic acid encoding an orthologue, paralogue or homologue of any of the amino acid sequences given in Table A1 to A7 of the Examples section.

[0235] A portion of a nucleic acid may be prepared, for example, by making one or more deletions to the nucleic acid. The portions may be used in isolated form or they may be fused to other coding (or non-coding) sequences in order to, for example, produce a protein that combines several activities. When fused to other coding sequences, the resultant polypeptide produced upon translation may be bigger than that predicted for the protein portion.

[0236] Concerning CRSP33-like polypeptides, portions useful in the methods of the invention, encode a CRSP33-like polypeptide as defined herein, and have substantially the same biological activity as the amino acid sequences given in Table A1 of the Examples section. Preferably, the portion is a portion of any one of the nucleic acids given in Table A1 of the Examples section, or is a portion of a nucleic acid encoding an orthologue or paralogue of any one of the amino acid sequences given in Table A1 of the Examples section. Preferably the portion is at least 500, 550, 600, 650, 700, 750, 800, 850, 900, 950, 1000 or more consecutive nucleotides in length, the consecutive nucleotides being of any one of the nucleic acid sequences given in Table A1 of the Examples section, or of a nucleic acid encoding an orthologue or paralogue of any one of the amino acid sequences given in Table A1 of the Examples section. Most preferably the portion is a portion of the nucleic acid of SEQ ID NO: 1. Preferably, the portion encodes a fragment of an amino acid sequence which, when used in the construction of a phylogenetic tree, such as the one depicted in FIG. 2, clusters with the group of CRSP33-like polypeptides comprising the amino acid sequence represented by SEQ ID NO: 2 or SEQ ID NO: 4 rather than with any other group.

[0237] Concerning MCB polypeptides, portions useful in the methods of the invention, encode an MCB polypeptide as defined herein, and have substantially the same biological activity as the amino acid sequences given in Table A2 of the Examples section. Preferably, the portion is a portion of any one of the nucleic acids given in Table A2 of the Examples section, or is a portion of a nucleic acid encoding an orthologue or paralogue of any one of the amino acid sequences given in Table A2 of the Examples section. Preferably the portion is at least 100, 200, 300, 400, 500, 550, 600, 650, 700, 750, 800, 850, 900, 950, 1000, 1050, 1100, 1150, 1200, 1250, 1300, 1350, 1400, 1450, 1500, 1550, 1600, 1650, 1700, 1750, 1800, 1850, 1900, 1950, 2000, 2050 consecutive nucleotides in length, the consecutive nucleotides being of any one of the nucleic acid sequences given in Table A2 of the Examples section, or of a nucleic acid encoding an orthologue or paralogue of any one of the amino acid sequences given in Table A2 of the Examples section. Most preferably the portion is a portion of the nucleic acid of SEQ ID NO: 44. Preferably, the portion encodes a fragment of an amino acid sequence comprising a sequence having in increasing order of preference at least 30%, 31%, 32%, 33%, 34%, 35%, 36%, 37%, 38%, 39%, 40%, 41%, 42%, 43%, 44%, 45%, 46%, 47%, 48%, 49%, 50%, 51%, 52%, 53%, 54%, 55%, 56%, 57%, 58%, 59%, 60%, 61%, 62%, 63%, 64%, 65%, 66%, 67%, 68%, 69%, 70%, 71%, 72%, 73%, 74%, 75%, 76%, 77%, 78%, 79%, 80%, 81%, 82%, 83%, 84%, 85%, 86%, 87%, 88%, 89%, 90%, 91%, 92%, 93%, 94%, 95%, 96%, 97%, 98%, or 99% overall sequence identity to any of the amino acid sequences of Table A2 preferably to the sequence represented by SEQ ID NO: 45.

[0238] Concerning SRT2 polypeptides, portions useful in the methods of the invention, encode a SRT2 polypeptide as defined herein, and have substantially the same biological activity as the amino acid sequences given in Table A3 of the Examples section. Preferably, the portion is a portion of any one of the nucleic acids given in Table A3 of the Examples section, or is a portion of a nucleic acid encoding an orthologue or paralogue of any one of the amino acid sequences given in Table A3 of the Examples section. Preferably the portion is at least 200, 300, 400, 500, 550, 600, 650, 700, 750, 800, 850, 900, 950, 1000, 1050, 1100, 1150, 1200, 1250, 1300, 1350, 1400, 1450, 1500, 1550 consecutive nucleotides in length, the consecutive nucleotides being of any one of the nucleic acid sequences given in Table A3 of the Examples section, or of a nucleic acid encoding an orthologue or paralogue of any one of the amino acid sequences given in Table A3 of the Examples section. Most preferably the portion is a portion of the nucleic acid of SEQ ID NO: 198. Preferably, the portion encodes a fragment of an amino acid sequence which, when used in the construction of a phylogenetic tree of all the 18 Arabidopsis HDAC polypeptides as described by Hollender and Lieu 2008 and listed below, clusters with SRT1 or SRT2 polypeptides which represent the SRT2 polypeptides of Arabidopsis thaliana, rather than with any other polypeptide.

[0239] Concerning YRP2 polypeptides, portions useful in the methods of the invention, encode a YRP2 polypeptide as defined herein, and have substantially the same biological activity as the amino acid sequences given in Table A4 of the Examples section. Preferably, the portion is a portion of any one of the nucleic acids given in Table A4 of the Examples section, or is a portion of a nucleic acid encoding an orthologue or paralogue of any one of the amino acid sequences given in Table A4 of the Examples section. Preferably the portion is at least 1150, 1200, 1250, 1300, 1350, 1400, 1450, 1500, 1550, 1600, 1650, 1700, 1750, 1800, 1850, 1900, 1950, 2000, 2050, 2100, 2150, 2200, 2250, 2300, 2350 or more consecutive nucleotides in length, the consecutive nucleotides being of any one of the nucleic acid sequences given in Table A4 of the Examples section, or of a nucleic acid encoding an orthologue or paralogue of any one of the amino acid sequences given in Table A4 of the Examples section. Most preferably the portion is a portion of the nucleic acid of SEQ ID NO: 235, SEQ ID NO: 237 or SEQ ID NO: 239. Preferably, the portion encodes a fragment of an amino acid sequence which, when used in the construction of a phylogenetic tree, clusters with the group of YRP2 polypeptides comprising the amino acid sequence represented by SEQ ID NO: 236, SEQ ID NO: 238 or SEQ ID NO: 240, rather than with any other group.

[0240] Concerning YRP3 polypeptides, portions useful in the methods of the invention, encode a YRP3 polypeptide as defined herein, and have substantially the same biological activity as the amino acid sequences given in Table A5 of the Examples section. Preferably, the portion is a portion of any one of the nucleic acids given in Table A5 of the Examples section, or is a portion of a nucleic acid encoding an orthologue or paralogue of any one of the amino acid sequences given in Table A5 of the Examples section. Preferably the portion is at least 2000, 2250, 2500, 2750, 3000, 3250, 3500, 3750, 4000 or more consecutive nucleotides in length, the consecutive nucleotides being of any one of the nucleic acid sequences given in Table A5 of the Examples section, or of a nucleic acid encoding an orthologue or paralogue of any one of the amino acid sequences given in Table A5 of the Examples section. Most preferably the portion is a portion of the nucleic acid of SEQ ID NO: 244, SEQ ID NO: 246, SEQ ID NO: 248, SEQ ID NO: 250, SEQ ID NO: 252 or SEQ ID NO: 254. Preferably, the portion encodes a fragment of an amino acid sequence which, when used in the construction of a phylogenetic tree, clusters with the group of YRP3 polypeptides comprising the amino acid sequence represented by SEQ ID NO: 245, SEQ ID NO: 247, SEQ ID NO: 249, SEQ ID NO: 251, SEQ ID NO: 253 or SEQ ID NO: 255, rather than with any other group.

[0241] Concerning YRP4 polypeptides, portions useful in the methods of the invention, encode a YRP4 polypeptide as defined herein, and have substantially the same biological activity as the amino acid sequences given in Table A6 of the Examples section. Preferably, the portion is a portion of any one of the nucleic acids given in Table A6 of the Examples section, or is a portion of a nucleic acid encoding an orthologue or paralogue of any one of the amino acid sequences given in Table A6 of the Examples section. Preferably the portion is at least 1700, 1750, 1800, 1850, 1900, 1950, 2000, 2050, 2100, 2150, 2200, 2250, 2300, 2350, 2400, 2450, 2500, 2550, 2600, 2650, 2700, 2750, 2800, 2850, 2900, 2950, 3000, 3050, 3100, 3150, 3200, 3250, 3300, 3350, 3400 or more consecutive nucleotides in length, the consecutive nucleotides being of any one of the nucleic acid sequences given in Table A6 of the Examples section, or of a nucleic acid encoding an orthologue or paralogue of any one of the amino acid sequences given in Table A6 of the Examples section. Most preferably the portion is a portion of the nucleic acid of SEQ ID NO: 261 or SEQ ID NO: 263. Preferably, the portion encodes a fragment of an amino acid sequence which, when used in the construction of a phylogenetic tree, clusters with the group of YRP4 polypeptides comprising the amino acid sequence represented by SEQ ID NO: 262 or SEQ ID NO: 264, rather than with any other group.

[0242] Concerning SPX-RING polypeptides, portions useful in the methods of the invention, encode a SPX-RING polypeptide as defined herein, and have substantially the same biological activity as the amino acid sequences given in Table A7 of the Examples section. Preferably, the portion is a portion of any one of the nucleic acids given in Table A7 of the Examples section, or is a portion of a nucleic acid encoding an orthologue or paralogue of any one of the amino acid sequences given in Table A7 of the Examples section. Preferably the portion is at least 100, 200, 300, 400, 500, 550, 600, 650, 700, 750, 800, 850, 900, 950, 1000, 1050, 1100, 1150, 1200, 1250, 1300, 1350, 1400, 1450, 1500, 1550 consecutive nucleotides in length, the consecutive nucleotides being of any one of the nucleic acid sequences given in Table A7 of the Examples section, or of a nucleic acid encoding an orthologue or paralogue of any one of the amino acid sequences given in Table A7 of the Examples section. Most preferably the portion is a portion of the nucleic acid of SEQ ID NO: 270. Preferably, the portion encodes a fragment of protein comprising a motif having in increasing order of preference at least 50%, 51%, 52%, 53%, 54%, 55%, 56%, 57%, 58%, 59%, 60%, 61%, 62%, 63%, 64%, 65%, 66%, 67%, 68%, 69%, 70%, 71%, 72%, 73%, 74%, 75%, 76%, 77%, 78%, 79%, 80%, 81%, 82%, 83%, 84%, 85%, 86%, 87%, 88%, 89%, 90%, 91%, 92%, 93%, 94%, 95%, 96%, 97%, 98%, or 99% overall sequence identity to any one or more of the motif as set forth in Table D1.

[0243] Another nucleic acid variant useful in the methods of the invention is a nucleic acid capable of hybridising, under reduced stringency conditions, preferably under stringent conditions, with a nucleic acid encoding a CRSP33-like polypeptide, or an MCB polypeptide, or an SRT2 polypeptide, or a YRP2 polypeptide, or a YRP3 polypeptide, or a YRP4 polypeptide, or an SPX-RING polypeptide, as defined herein, or with a portion as defined herein.

[0244] According to the present invention, there is provided a method for enhancing yield-related traits and/or abiotic stress tolerance in plants, comprising introducing and expressing in a plant a nucleic acid capable of hybridizing to any one of the nucleic acids given in Table A1 to A7 of the Examples section, or comprising introducing and expressing in a plant a nucleic acid capable of hybridising to a nucleic acid encoding an orthologue, paralogue or homologue of any of the nucleic acid sequences given in Table A of the Examples section.

[0245] Concerning CRSP33-like polypeptides, hybridising sequences useful in the methods of the invention encode a CRSP33-like polypeptide as defined herein, having substantially the same biological activity as the amino acid sequences given in Table A1 of the Examples section. Preferably, the hybridising sequence is capable of hybridising to the complement of any one of the nucleic acids given in Table A1 of the Examples section, or to a portion of any of these sequences, a portion being as defined above, or the hybridising sequence is capable of hybridising to the complement of a nucleic acid encoding an orthologue or paralogue of any one of the amino acid sequences given in Table A1 of the Examples section. Most preferably, the hybridising sequence is capable of hybridising to the complement of a nucleic acid as represented by SEQ ID NO: 1 or SEQ ID NO: 3 or to a portion of either.

[0246] Preferably, the hybridising sequence encodes a polypeptide with an amino acid sequence which, when full-length and used in the construction of a phylogenetic tree, such as the one depicted in FIG. 2, clusters with the group of CRSP33-like polypeptides comprising the amino acid sequence represented by SEQ ID NO: 2 or SEQ ID NO: 4 rather than with any other group.

[0247] Concerning MCB polypeptides, hybridising sequences useful in the methods of the invention encode an MCB polypeptide as defined herein, having substantially the same biological activity as the amino acid sequences given in Table A2 of the Examples section. Preferably, the hybridising sequence is capable of hybridising to the complement of any one of the nucleic acids given in Table A2 of the Examples section, or to a portion of any of these sequences, a portion being as defined above, or the hybridising sequence is capable of hybridising to the complement of a nucleic acid encoding an orthologue or paralogue of any one of the amino acid sequences given in Table A2 of the Examples section. Most preferably, the hybridising sequence is capable of hybridising to the complement of a nucleic acid as represented by SEQ ID NO: 44 or to a portion thereof.

[0248] Preferably, the hybridising sequence encodes a polypeptide with an amino acid sequence comprising a sequence having in increasing order of preference at least 30%, 31%, 32%, 33%, 34%, 35%, 36%, 37%, 38%, 39%, 40%, 41%, 42%, 43%, 44%, 45%, 46%, 47%, 48%, 49%, 50%, 51%, 52%, 53%, 54%, 55%, 56%, 57%, 58%, 59%, 60%, 61%, 62%, 63%, 64%, 65%, 66%, 67%, 68%, 69%, 70%, 71%, 72%, 73%, 74%, 75%, 76%, 77%, 78%, 79%, 80%, 81%, 82%, 83%, 84%, 85%, 86%, 87%, 88%, 89%, 90%, 91%, 92%, 93%, 94%, 95%, 96%, 97%, 98%, or 99% overall sequence identity to any of the amino acid sequences of Table A2 preferably to the sequence represented by SEQ ID NO: 45.

[0249] Concerning SRT2 polypeptides, hybridising sequences useful in the methods of the invention encode a SRT2 polypeptide as defined herein, having substantially the same biological activity as the amino acid sequences given in Table A3 of the Examples section. Preferably, the hybridising sequence is capable of hybridising to the complement of any one of the nucleic acids given in Table A3 of the Examples section, or to a portion of any of these sequences, a portion being as defined above, or the hybridising sequence is capable of hybridising to the complement of a nucleic acid encoding an orthologue or paralogue of any one of the amino acid sequences given in Table A3 of the Examples section. Most preferably, the hybridising sequence is capable of hybridising to the complement of a nucleic acid as represented by SEQ ID NO: 198 or to a portion thereof.

[0250] Preferably, the hybridising sequence encodes a polypeptide with an amino acid sequence which, when used in the construction of a phylogenetic tree of all the 18 Arabidopsis HDAC polypeptides as described by Hollender and Lieu 2008 and listed below, clusters with SRT1 or SRT2 polypeptides which represent the SRT2 polypeptides of Arabidopsis thaliana, rather than with any other polypeptide.

[0251] Concerning YRP2 polypeptides, hybridising sequences useful in the methods of the invention encode a YRP2 polypeptide as defined herein, having substantially the same biological activity as the amino acid sequences given in Table A4 of the Examples section. Preferably, the hybridising sequence is capable of hybridising to the complement of any one of the nucleic acids given in Table A4, or to a portion of any of these sequences, a portion being as defined above, or the hybridising sequence is capable of hybridising to the complement of a nucleic acid encoding an orthologue or paralogue of any one of the amino acid sequences given in Table A4. Most preferably, the hybridising sequence is capable of hybridising to the complement of a nucleic acid as represented by SEQ ID NO: 235, SEQ ID NO: 237 or SEQ ID NO: 239 or to a portion thereof.

[0252] Preferably, the hybridising sequence encodes a polypeptide with an amino acid sequence which, when full-length and used in the construction of a phylogenetic tree, clusters with the group of YRP2 polypeptides comprising the amino acid sequence represented by SEQ ID NO: 236, SEQ ID NO: 238 or SEQ ID NO: 240 rather than with any other group.

[0253] Concerning YRP3 polypeptides, hybridising sequences useful in the methods of the invention encode a YRP3 polypeptide as defined herein, having substantially the same biological activity as the amino acid sequences given in Table A5 of the Examples section. Preferably, the hybridising sequence is capable of hybridising to the complement of any one of the nucleic acids given in Table A5 or to a portion of any of these sequences, a portion being as defined above, or the hybridising sequence is capable of hybridising to the complement of a nucleic acid encoding an orthologue or paralogue of any one of the amino acid sequences given in Table A5. Most preferably, the hybridising sequence is capable of hybridising to the complement of a nucleic acid as represented by SEQ ID NO: 244, SEQ ID NO: 246, SEQ ID NO: 248, SEQ ID NO: 250, SEQ ID NO: 252 or SEQ ID NO: 264 or to a portion thereof.

[0254] Preferably, the hybridising sequence encodes a polypeptide with an amino acid sequence which, when full-length and used in the construction of a phylogenetic tree, clusters with the group of YRP3 polypeptides comprising the amino acid sequence represented by SEQ ID NO: 245, SEQ ID NO: 247, SEQ ID NO: 249, SEQ ID NO: 251, SEQ ID NO: 253 and SEQ ID NO: 255 rather than with any other group.

[0255] Concerning YRP4 polypeptides, hybridising sequences useful in the methods of the invention encode a YRP4 polypeptide as defined herein, having substantially the same biological activity as the amino acid sequences given in Table A6 of the Examples section. Preferably, the hybridising sequence is capable of hybridising to the complement of any one of the nucleic acids given in Table A6, or to a portion of any of these sequences, a portion being as defined above, or the hybridising sequence is capable of hybridising to the complement of a nucleic acid encoding an orthologue or paralogue of any one of the amino acid sequences given in Table A6. Most preferably, the hybridising sequence is capable of hybridising to the complement of a nucleic acid as represented by SEC) ID NO: 261 or SEQ ID NO: 263 or to a portion thereof.

[0256] Preferably, the hybridising sequence encodes a polypeptide with an amino acid sequence which, when full-length and used in the construction of a phylogenetic tree, clusters with the group of YRP4 polypeptides comprising the amino acid sequence represented by SEQ ID NO: 262 or SEQ ID NO: 264 rather than with any other group.

[0257] Concerning SPX-RING polypeptides, hybridising sequences useful in the methods of the invention encode a SPX-RING polypeptide as defined herein, having substantially the same biological activity as the amino acid sequences given in Table A7 of the Examples section. Preferably, the hybridising sequence is capable of hybridising to the complement of any one of the nucleic acids given in Table A7 of the Examples section, or to a portion of any of these sequences, a portion being as defined above, or the hybridising sequence is capable of hybridising to the complement of a nucleic acid encoding an orthologue or paralogue of any one of the amino acid sequences given in Table A7 of the Examples section. Most preferably, the hybridising sequence is capable of hybridising to the complement of a nucleic acid as represented by SEQ ID NO: 270 or to a portion thereof.

[0258] Preferably, the hybridising sequence encodes a polypeptide comprising a motif having in increasing order of preference at least 50%, 51%, 52%, 53%, 54%, 55%, 56%, 57%, 58%, 59%, 60%, 61%, 62%, 63%, 64%, 65%, 66%, 67%, 68%, 69%, 70%, 71%, 72%, 73%, 74%, 75%, 76%, 77%, 78%, 79%, 80%, 81%, 82%, 83%, 84%, 85%, 86%, 87%, 88%, 89%, 90%, 91%, 92%, 93%, 94%, 95%, 96%, 97%, 98%, or 99% overall sequence identity to any one or more of the motifs as set forth in Table D1.

[0259] Another nucleic acid variant useful in the methods of the invention is a splice variant encoding a CRSP33-like polypeptide, or an MCB polypeptide, or an SRT2 polypeptide, or a YRP2 polypeptide, or a YRP3 polypeptide, or a YRP4 polypeptide, or an SPX-RING polypeptide, as defined hereinabove, a splice variant being as defined herein.

[0260] According to the present invention, there is provided a method for enhancing yield-related traits in plants, comprising introducing and expressing in a plant a splice variant of any one of the nucleic acid sequences given in Table A1 to A7 of the Examples section, or a splice variant of a nucleic acid encoding an orthologue, paralogue or homologue of any of the amino acid sequences given in Table A1 to A7 of the Examples section.

[0261] Concerning CRSP33-like polypeptides, preferred splice variants are splice variants of a nucleic acid represented by SEQ ID NO: 1 or SEQ ID NO: 3, or a splice variant of a nucleic acid encoding an orthologue or paralogue of SEQ ID NO: 2 or SEQ ID NO: 4. Preferably, the amino acid sequence encoded by the splice variant, when used in the construction of a phylogenetic tree, such as the one depicted in FIG. 2, clusters with the group of CRSP33-like polypeptides comprising the amino acid sequence represented by SEQ ID NO: 2 or SEQ ID NO: 4 rather than with any other group.

[0262] Concerning MCB polypeptides, preferred splice variants are splice variants of a nucleic acid represented by SEQ ID NO: 44, or a splice variant of a nucleic acid encoding an orthologue or paralogue of SEQ ID NO: 45. Preferably, the amino acid sequence encoded by the splice variant comprises a sequence having in increasing order of preference at least 30%, 31%, 32%, 33%, 34%, 35%, 36%, 37%, 38%, 39%, 40%, 41%, 42%, 43%, 44%, 45%, 46%, 47%, 48%, 49%, 50%, 51%, 52%, 53%, 54%, 55%, 56%, 57%, 58%, 59%, 60%, 61%, 62%, 63%, 64%, 65%, 66%, 67%, 68%, 69%, 70%, 71%, 72%, 73%, 74%, 75%, 76%, 77%, 78%, 79%, 80%, 81%, 82%, 83%, 84%, 85%, 86%, 87%, 88%, 89%, 90%, 91%, 92%, 93%, 94%, 95%, 96%, 97%, 98%, or 99% overall sequence identity to any of the amino acid sequences of Table A2, preferably to the sequence represented by SEQ ID NO: 45

[0263] Concerning SRT2 polypeptides, preferred splice variants are splice variants of a nucleic acid represented by SEQ ID NO: 198, or a splice variant of a nucleic acid encoding an orthologue or paralogue of SEQ ID NO: 199. Preferably, the amino acid sequence encoded by the splice variant, which when used in the construction of a phylogenetic tree of all the 18 Arabidopsis HDAC polypeptides as described by Hollender and Lieu 2008 and listed below, clusters with SRT1 or SRT2 polypeptides which represent the SRT2 polypetides of Arabidopsis thaliana, rather than with any other polypeptide.

[0264] Concerning YRP2 polypeptides, preferred splice variants are splice variants of a nucleic acid represented by any of SEQ IDI NO: 235, SEQ ID NO: 237 or SEQ ID NO: 239, or a splice variant of a nucleic acid encoding an orthologue or paralogue of any of SEQ ID NO: 236, SEQ ID NO: 238 or SEQ ID NO: 240. Preferably, the amino acid sequence encoded by the splice variant, when used in the construction of a phylogenetic tree, clusters with the group of YRP2 polypeptides comprising the amino acid sequence represented by of SEQ ID NO: 236, SEQ ID NO: 238 or SEQ ID NO: 240 rather than with any other group.

[0265] Concerning YRP3 polypeptides, preferred splice variants are splice variants of a nucleic acid represented by any of SEQ ID NO: 244, SEQ ID NO: 246, SEQ ID NO: 248, SEQ ID NO: 250, SEQ ID NO: 252 or SEQ ID NO: 254, or a splice variant of a nucleic acid encoding an orthologue or paralogue of any of SEQ ID NO: 245, SEQ ID NO: 247, SEQ ID NO: 249, SEQ ID NO: 251, SEQ ID NO: 253 or SEQ ID NO: 255. Preferably, the amino acid sequence encoded by the splice variant, when used in the construction of a phylogenetic tree, clusters with the group of YRP3 polypeptides comprising the amino acid sequence represented by SEQ ID NO: 245, SEQ ID NO: 247, SEQ ID NO: 249, SEQ ID NO: 251, SEQ ID NO: 253 or SEQ ID NO: 255 rather than with any other group.

[0266] Concerning YRP4 polypeptides, preferred splice variants are splice variants of a nucleic acid represented by any of SEQ ID NO: 261 or SEQ ID NO: 263, or a splice variant of a nucleic acid encoding an orthologue or paralogue of any of SEQ ID NO: 262 or SEQ ID NO: 264. Preferably, the amino acid sequence encoded by the splice variant, when used in the construction of a phylogenetic tree, clusters with the group of YRP4 polypeptides comprising the amino acid sequence represented by SEQ ID NO: 262 or SEQ ID NO: 264 rather than with any other group.

[0267] Preferred splice variants are splice variants of a nucleic acid represented by SEQ ID NO: 270 or a splice variant of a nucleic acid encoding an orthologue or paralogue of SEQ ID NO: 271. Preferably, the amino acid sequence encoded by the splice variant comprises a motif having in increasing order of preference at least 50%, 51%, 52%, 53%, 54%, 55%, 56%, 57%, 58%, 59%, 60%, 61%, 62%, 63%, 64%, 65%, 66%, 67%, 68%, 69%, 70%, 71%, 72%, 73%, 74%, 75%, 76%, 77%, 78%, 79%, 80%, 81%, 82%, 83%, 84%, 85%, 86%, 87%, 88%, 89%, 90%, 91%, 92%, 93%, 94%, 95%, 96%, 97%, 98%, or 99% overall sequence identity to any one or more of the motifs as set forth in Table D1.

[0268] Another nucleic acid variant useful in performing the methods of the invention is an allelic variant of a nucleic acid encoding a CRSP33-like polypeptide, or an MCB polypeptide, or an SRT2 polypeptide, or a YRP2 polypeptide, or a YRP3 polypeptide, or a YRP4 polypeptide, or an SPX-RING polypeptide, as defined hereinabove, an allelic variant being as defined herein.

[0269] According to the present invention, there is provided a method for enhancing yield-related traits and/or abiotic stress tolerance in plants, comprising introducing and expressing in a plant an allelic variant of any one of the nucleic acids given in Table A1 to A7 of the Examples section, or comprising introducing and expressing in a plant an allelic variant of a nucleic acid encoding an orthologue, paralogue or homologue of any of the amino acid sequences given in Table A1 to A7 of the Examples section.

[0270] Concerning CRSP33-like polypeptides, the polypeptides encoded by allelic variants useful in the methods of the present invention have substantially the same biological activity as the CRSP33-like polypeptide of SEQ ID NO: 2 and any of the amino acids depicted in Table A1 of the Examples section. Allelic variants exist in nature, and encompassed within the methods of the present invention is the use of these natural alleles. Preferably, the allelic variant is an allelic variant of SEQ ID NO: 1 or SEQ ID NO: 3, or an allelic variant of a nucleic acid encoding an orthologue or paralogue of SEQ ID NO: 2 or SEQ ID NO 4. Preferably, the amino acid sequence encoded by the allelic variant, when used in the construction of a phylogenetic tree, such as the one depicted in FIG. 2, clusters with the CRSP33-like polypeptides comprising the amino acid sequence represented by SEQ ID NO: 2 or SEQ ID NO: 4 rather than with any other group.

[0271] Concerning MCB polypeptides, the polypeptides encoded by allelic variants useful in the methods of the present invention have substantially the same biological activity as the MCB polypeptide of SEQ ID NO: 45 and any of the amino acids depicted in Table A2 of the Examples section. Allelic variants exist in nature, and encompassed within the methods of the present invention is the use of these natural alleles. Preferably, the allelic variant is an allelic variant of SEQ ID NO: 44 or an allelic variant of a nucleic acid encoding an orthologue or paralogue of SEQ ID NO: 45. Preferably, the amino acid sequence encoded by the allelic variant comprises a sequence having in increasing order of preference at least 30%, 31%, 32%, 33%, 34%, 35%, 36%, 37%, 38%, 39%, 40%, 41%, 42%, 43%, 44%, 45%, 46%, 47%, 48%, 49%, 50%, 51%, 52%, 53%, 54%, 55%, 56%, 57%, 58%, 59%, 60%, 61%, 62%, 63%, 64%, 65%, 66%, 67%, 68%, 69%, 70%, 71%, 72%, 73%, 74%, 75%, 76%, 77%, 78%, 79%, 80%, 81%, 82%, 83%, 84%, 85%, 86%, 87%, 88%, 89%, 90%, 91%, 92%, 93%, 94%, 95%, 96%, 97%, 98%, or 99% overall sequence identity to any of the amino acid sequences of Table A2, preferably to the sequence represented by SEQ ID NO: 45.

[0272] Concerning SRT2 polypeptides, the polypeptides encoded by allelic variants useful in the methods of the present invention have substantially the same biological activity as the SRT2 polypeptide of SEQ ID NO: 199 and any of the amino acids depicted in Table A3 of the Examples section. Allelic variants exist in nature, and encompassed within the methods of the present invention is the use of these natural alleles. Preferably, the allelic variant is an allelic variant of SEQ ID NO: 198 or an allelic variant of a nucleic acid encoding an orthologue or paralogue of SEQ ID NO: 199. Preferably, the amino acid sequence encoded by the allelic variant, which when used in the construction of a phylogenetic tree of all the 18 Arabidopsis HDAC polypeptides as described by Hollender and Lieu 2008 and listed below, clusters with SRT1 or SRT2 polypeptides which represent the SRT2 polypetides of Arabidopsis thaliana, rather than with any other polypeptide.

[0273] Concerning YRP2 polypeptides, the polypeptides encoded by allelic variants useful in the methods of the present invention have substantially the same biological activity as the YRP2 polypeptide of SEQ ID NO: 236 or any of the amino acids depicted in Table A4 of the Examples section. Allelic variants exist in nature, and encompassed within the methods of the present invention is the use of these natural alleles. Preferably, the allelic variant is an allelic variant of any of SEQ ID NO: 235, SEQ ID NO: 237 or SEQ ID NO: 239 or an allelic variant of a nucleic acid encoding an orthologue or paralogue of SEQ ID NO: 236, SEQ ID NO: 238 or SEQ ID NO: 240. Preferably, the amino acid sequence encoded by the allelic variant, clusters in a phylogenetic tree with the YRP2 polypeptides comprising the amino acid sequence represented by SEQ ID NO: 236, SEQ ID NO: 238 or SEQ ID NO: 240 rather than with any other group.

[0274] Concerning YRP3 polypeptides, the polypeptides encoded by allelic variants useful in the methods of the present invention have substantially the same biological activity as the YRP3 polypeptide of SEQ ID NO: 245 or any of the amino acids depicted in Table A5 of the Examples section. Allelic variants exist in nature, and encompassed within the methods of the present invention is the use of these natural alleles. Preferably, the allelic variant is an allelic variant of any of SEQ ID NO: 244, SEQ ID NO: 246, SEQ ID NO: 248, SEQ ID NO: 250, SEQ ID NO: 252 or SEQ ID NO: 254 or an allelic variant of a nucleic acid encoding an orthologue or paralogue of SEQ ID NO: 245, SEQ ID NO: 247, SEQ ID NO: 249, SEQ ID NO: 251, SEQ ID NO: 253 or SEQ ID NO: 255. Preferably, the amino acid sequence encoded by the allelic variant, clusters in a phylogenetic tree with the YRP3 polypeptides comprising the amino acid sequence represented by SEQ ID NO: 245, SEQ ID NO: 247, SEQ ID NO: 249, SEQ ID NO: 251, SEQ ID NO: 253 or SEQ ID NO: 255 rather than with any other group.

[0275] Concerning YRP4 polypeptides, the polypeptides encoded by allelic variants useful in the methods of the present invention have substantially the same biological activity as the YRP4 polypeptide of any of SEQ ID NO: 262 or any of the amino acids depicted in Table A6 of the Examples section. Allelic variants exist in nature, and encompassed within the methods of the present invention is the use of these natural alleles. Preferably, the allelic variant is an allelic variant of any of SEQ ID NO: 261 or SEQ ID NO: 263 or an allelic variant of a nucleic acid encoding an orthologue or paralogue of SEQ ID NO: 262 or SEQ ID NO: 264. Preferably, the amino acid sequence encoded by the allelic variant, clusters in a phylogenetic tree with the YRP4 polypeptides comprising the amino acid sequence represented by SEQ ID NO: 262 or SEQ ID NO: 264 rather than with any other group.

[0276] Concerning SPX-RING polypeptides, the polypeptides encoded by allelic variants useful in the methods of the present invention have substantially the same biological activity as the SPX-RING polypeptide of SEQ ID NO: 271 and any of the amino acids depicted in Table A7 of the Examples section. Allelic variants exist in nature, and encompassed within the methods of the present invention is the use of these natural alleles. Preferably, the allelic variant is an allelic variant of SEQ ID NO: 270 or an allelic variant of a nucleic acid encoding an orthologue or paralogue of SEQ ID NO: 271. Preferably, the amino acid sequence encoded by the allelic variant comprises a motif having in increasing order of preference at least 50%, 51%, 52%, 53%, 54%, 55%, 56%, 57%, 58%, 59%, 60%, 61%, 62%, 63%, 64%, 65%, 66%, 67%, 68%, 69%, 70%, 71%, 72%, 73%, 74%, 75%, 76%, 77%, 78%, 79%, 80%, 81%, 82%, 83%, 84%, 85%, 86%, 87%, 88%, 89%, 90%, 91%, 92%, 93%, 94%, 95%, 96%, 97%, 98%, or 99% overall sequence identity to any one or more of the motifs as set forth in Table D1.

[0277] Gene shuffling or directed evolution may also be used to generate variants of nucleic acids encoding CRSP33-like polypeptides, or MCB polypeptides, or SRT2 polypeptides, or YRP2 polypeptides, or YRP3 polypeptides, or YRP4 polypeptides, or SPX-RING polypeptides, as defined above; the term “gene shuffling” being as defined herein.

[0278] According to the present invention, there is provided a method for enhancing yield-related traits and/or abiotic stress tolerance in plants, comprising introducing and expressing in a plant a variant of any one of the nucleic acid sequences given in Table A1 to A7 of the Examples section, or comprising introducing and expressing in a plant a variant of a nucleic acid encoding an orthologue, paralogue or homologue of any of the amino acid sequences given in Table A1 to A7 of the Examples section, which variant nucleic acid is obtained by gene shuffling.

[0279] Concerning CRSP33-like polypeptides, preferably, the amino acid sequence encoded by the variant nucleic acid obtained by gene shuffling, when used in the construction of a phylogenetic tree such as the one depicted in FIG. 2, clusters with the group of CRSP33-like polypeptides comprising the amino acid sequence represented by SEQ ID NO: 2 or SEQ ID NO: 4 rather than with any other group.

[0280] Concerning MCB polypeptides, preferably, the amino acid sequence encoded by the variant nucleic acid obtained by gene shuffling comprises a sequence having in increasing order of preference at least 30%, 31%, 32%, 33%, 34%, 35%, 36%, 37%, 38%, 39%, 40%, 41%, 42%, 43%, 44%, 45%, 46%, 47%, 48%, 49%, 50%, 51%, 52%, 53%, 54%, 55%, 56%, 57%, 58%, 59%, 60%, 61%, 62%, 63%, 64%, 65%, 66%, 67%, 68%, 69%, 70%, 71%, 72%, 73%, 74%, 75%, 76%, 77%, 78%, 79%, 80%, 81%, 82%, 83%, 84%, 85%, 86%, 87%, 88%, 89%, 90%, 91%, 92%, 93%, 94%, 95%, 96%, 97%, 98%, or 99% overall sequence identity to any of the amino acid sequences of Table A2 preferably to the sequence represented by SEQ ID NO: 45.

[0281] Concerning SRT2 polypeptides, preferably, the amino acid sequence encoded by the variant nucleic acid obtained by gene shuffling, which when used in the construction of a phylogenetic tree of all the 18 Arabidopsis HDAC polypeptides as described by Hollender and Lieu 2008 and listed below, clusters with SRT1 or SRT2 polypeptides which represent the SRT2 polypetides of Arabidopsis thaliana, rather than with any other polypeptide.

[0282] Concerning YRP2 polypeptides, preferably, the amino acid sequence encoded by the variant nucleic acid obtained by gene shuffling, when used in the construction of a phylogenetic tree, clusters with the group of YRP2 polypeptides comprising the amino acid sequence represented by SEQ ID NO: 236, SEQ ID NO: 238 or SEQ ID NO: 240 rather than with any other group.

[0283] Concerning YRP3 polypeptides, preferably, the amino acid sequence encoded by the variant nucleic acid obtained by gene shuffling, when used in the construction of a phylogenetic tree, clusters with the group of YRP3 polypeptides comprising the amino acid sequence represented by SEQ ID NO: 245, SEQ ID NO: 247, SEQ ID NO: 249, SEQ ID NO: 251, SEQ ID NO: 253 or SEQ ID NO: 255 rather than with any other group.

[0284] Concerning YRP4 polypeptides, preferably, the amino acid sequence encoded by the variant nucleic acid obtained by gene shuffling, when used in the construction of a phylogenetic tree, clusters with the group of YRP4 polypeptides comprising the amino acid sequence represented by SEQ ID NO: 262 or SEQ ID NO: 264 rather than with any other group.

[0285] Concerning SPX-RING polypeptides, preferably, the amino acid sequence encoded by the variant nucleic acid obtained by gene shuffling comprises a motif having in increasing order of preference at least 50%, 51%, 52%, 53%, 54%, 55%, 56%, 57%, 58%, 59%, 60%, 61%, 62%, 63%, 64%, 65%, 66%, 67%, 68%, 69%, 70%, 71%, 72%, 73%, 74%, 75%, 76%, 77%, 78%, 79%, 80%, 81%, 82%, 83%, 84%, 85%, 86%, 87%, 88%, 89%, 90%, 91%, 92%, 93%, 94%, 95%, 96%, 97%, 98%, or 99% overall sequence identity to any one or more of the motifs as set forth in Table D1.

[0286] Furthermore, nucleic acid variants may also be obtained by site-directed mutagenesis. Several methods are available to achieve site-directed mutagenesis, the most common being PCR based methods (Current Protocols in Molecular Biology. Wiley Eds.).

[0287] Nucleic acids encoding CRSP33-like polypeptides may be derived from any natural or artificial source. The nucleic acid may be modified from its native form in composition and/or genomic environment through deliberate human manipulation. Preferably the CRSP33-like polypeptide-encoding nucleic acid is from a plant, further preferably from a dicotyledonous plant, more preferably from the family Solanaceae, most preferably the nucleic acid is from Lycopersicon esculentum.

[0288] Nucleic acids encoding MCB polypeptides may be derived from any natural or artificial source. The nucleic acid may be modified from its native form in composition and/or genomic environment through deliberate human manipulation. Preferably the MCB polypeptide-encoding nucleic acid is from a plant, further preferably from a monocotyledonous plant, more preferably from Triticum species, most preferably from Triticum aestivum.

[0289] Nucleic acids encoding SRT2 polypeptides may be derived from any natural or artificial source. The nucleic acid may be modified from its native form in composition and/or genomic environment through deliberate human manipulation. Preferably the SRT2 polypeptide-encoding nucleic acid is from a plant, further preferably from a monocotyledonous plant, more preferably from the family Poaceae, most preferably the nucleic acid is from Oryza sativa.

[0290] Nucleic acids encoding YRP2 polypeptides may be derived from any natural or artificial source. The nucleic acid may be modified from its native form in composition and/or genomic environment through deliberate human manipulation. Preferably the YRP2 polypeptide-encoding nucleic acid is from a plant, further preferably from a moss, a monocotyledonous or dicotyledonous plant, more preferably from the family Funariaceae, Solanaceae or Fabaceae.

[0291] Nucleic acids encoding YRP3 polypeptides may be derived from any natural or artificial source. The nucleic acid may be modified from its native form in composition and/or genomic environment through deliberate human manipulation. Preferably the YRP3 polypeptide-encoding nucleic acid is from a plant, further preferably from a moss, a monocotyledonous or dicotyledonous plant, more preferably from the family Funariaceae, Salicaceae or Poaceae.

[0292] Nucleic acids encoding YRP4 polypeptides may be derived from any natural or artificial source. The nucleic acid may be modified from its native form in composition and/or genomic environment through deliberate human manipulation. Preferably the YRP4 polypeptide-encoding nucleic acid is from a plant, further preferably from a monocotyledonous or dicotyledonous plant, more preferably from the family Poaceae or Solanaceae.

[0293] Nucleic acids encoding SPX-RING polypeptides may be derived from any natural or artificial source. The nucleic acid may be modified from its native form in composition and/or genomic environment through deliberate human manipulation. Preferably the SPX-RING polypeptide-encoding nucleic acid is from a plant, further preferably from a monocotyledonous plant, more preferably from the family Poaceae, most preferably the nucleic acid is from Oryza sativa.

[0294] Concerning CRSP33-like polypeptides, or MCB polypeptides, or SRT2 polypeptides, or SPX-RING polypeptides, performance of the methods of the invention gives plants having enhanced yield-related traits. In particular performance of the methods of the invention gives plants having increased yield, especially increased seed yield relative to control plants. The terms “yield” and “seed yield” are described in more detail in the “definitions” section herein.

[0295] Concerning YRP2 polypeptides, or YRP3 polypeptides, YRP4 polypeptides, performance of the methods of the invention gives plants having enhanced tolerance to abiotic stress.

[0296] Reference herein to enhanced yield-related traits is taken to mean an increase in biomass (weight) of one or more parts of a plant, which may include aboveground (harvestable) parts and/or (harvestable) parts below ground. In particular, such harvestable parts are seeds, and performance of the methods of the invention results in plants having increased green biomass and/or increased early vigour and/or increased seed yield relative to the seed yield of control plants.

[0297] Taking corn as an example, a yield increase may be manifested as one or more of the following: increase in the number of plants established per square meter, an increase in the number of ears per plant, an increase in the number of rows, number of kernels per row, kernel weight, thousand kernel weight, ear length/diameter, increase in the seed filling rate (which is the number of filled seeds divided by the total number of seeds and multiplied by 100), among others. Taking rice as an example, a yield increase may manifest itself as an increase in one or more of the following: number of plants per square meter, number of panicles per plant, number of spikelets per panicle, number of flowers (florets) per panicle (which is expressed as a ratio of the number of filled seeds over the number of primary panicles), increase in the seed filling rate (which is the number of filled seeds divided by the total number of seeds and multiplied by 100), increase in thousand kernel weight, among others.

[0298] Concerning abiotic stress tolerance the present invention provides a method for enhancing stress tolerance in plants, relative to control plants, which method comprises modulating expression in a plant of a nucleic acid encoding a YRP2 polypeptide, or a YRP3 polypeptide, or a YRP4 polypeptide, as defined herein.

[0299] Plants typically respond to exposure to stress by growing more slowly. In conditions of severe stress, the plant may even stop growing altogether. Mild stress on the other hand is defined herein as being any stress to which a plant is exposed which does not result in the plant ceasing to grow altogether without the capacity to resume growth. Mild stress in the sense of the invention leads to a reduction in the growth of the stressed plants of less than 40%, 35%, 30% or 25%, more preferably less than 20% or 15% in comparison to the control plant under non-stress conditions. Due to advances in agricultural practices (irrigation, fertilization, pesticide treatments) severe stresses are not often encountered in cultivated crop plants. As a consequence, the compromised growth induced by mild stress is often an undesirable feature for agriculture. Mild stresses are the everyday biotic and/or abiotic (environmental) stresses to which a plant is exposed. Abiotic stresses may be due to drought or excess water, anaerobic stress, salt stress, chemical toxicity, oxidative stress and hot, cold or freezing temperatures. The abiotic stress may be an osmotic stress caused by a water stress (particularly due to drought), salt stress, oxidative stress or an ionic stress. Biotic stresses are typically those stresses caused by pathogens, such as bacteria, viruses, fungi, nematodes and insects.

[0300] In particular, the methods of the present invention may be performed under conditions of (mild) drought to give plants having enhanced drought tolerance relative to control plants, which might manifest itself as an increased yield relative to control plants. As reported in Wang et al. (Planta (2003) 218: 1-14), abiotic stress leads to a series of morphological, physiological, biochemical and molecular changes that adversely affect plant growth and productivity. Drought, salinity, extreme temperatures and oxidative stress are known to be interconnected and may induce growth and cellular damage through similar mechanisms. Rabbani et al. (Plant Physiol (2003) 133: 1755-1767) describes a particularly high degree of “cross talk” between drought stress and high-salinity stress. For example, drought and/or salinisation are manifested primarily as osmotic stress, resulting in the disruption of homeostasis and ion distribution in the cell. Oxidative stress, which frequently accompanies high or low temperature, salinity or drought stress, may cause denaturing of functional and structural proteins. As a consequence, these diverse environmental stresses often activate similar cell signalling pathways and cellular responses, such as the production of stress proteins, up-regulation of anti-oxidants, accumulation of compatible solutes and growth arrest. The term “non-stress” conditions as used herein are those environmental conditions that allow optimal growth of plants. Persons skilled in the art are aware of normal soil conditions and climatic conditions for a given location. Plants with optimal growth conditions, (grown under non-stress conditions) typically yield in increasing order of preference at least 97%, 95%, 92%, 90%, 87%, 85%, 83%, 80%, 77% or 75% of the average production of such plant in a given environment. Average production may be calculated on harvest and/or season basis. Persons skilled in the art are aware of average yield productions of a crop.

[0301] Performance of the methods of the invention gives plants grown under (mild) drought conditions enhanced drought tolerance relative to control plants grown under comparable conditions. Therefore, according to the present invention, there is provided a method for enhancing drought tolerance in plants grown under (mild) drought conditions, which method comprises modulating expression in a plant of a nucleic acid encoding a YRP2 polypeptide, or a YRP3 polypeptide, or a YRP4 polypeptide.

[0302] Performance of the methods of the invention gives plants grown under conditions of nutrient deficiency, particularly under conditions of nitrogen deficiency, enhanced tolerance to stresses caused by nutrient deficiency relative to control plants. Therefore, according to the present invention, there is provided a method for enhancing tolerance to stresses caused by nutrient deficiency, which method comprises modulating expression in a plant of a nucleic acid encoding a YRP2 polypeptide, or a YRP3 polypeptide, or a YRP4 polypeptide. Nutrient deficiency may result from a lack of nutrients such as nitrogen, phosphates and other phosphorous-containing compounds, potassium, calcium, magnesium, manganese, iron and boron, amongst others.

[0303] Performance of the methods of the invention gives plants grown under conditions of salt stress, enhanced tolerance to salt relative to control plants grown under comparable conditions. Therefore, according to the present invention, there is provided a method for enhancing salt tolerance in plants grown under conditions of salt stress, which method comprises modulating expression in a plant of a nucleic acid encoding a YRP2 polypeptide, or a YRP3 polypeptide, or a YRP4 polypeptide. The term salt stress is not restricted to common salt (NaCl), but may be any one or more of: NaCl, KCl, LiCl, MgCl₂, CaCl₂, amongst others.

[0304] Concerning yield-related traits, the present invention provides a method for increasing yield, especially seed yield of plants, relative to control plants, which method comprises modulating expression in a plant of a nucleic acid encoding a CRSP33-like polypeptide, or an MCB polypeptide, or an SRT2 polypeptide, or an SPX-RING polypeptide, as defined herein.

[0305] Since the transgenic plants according to the present invention have increased yield, it is likely that these plants exhibit an increased growth rate (during at least part of their life cycle), relative to the growth rate of control plants at a corresponding stage in their life cycle.

[0306] The increased growth rate may be specific to one or more parts of a plant (including seeds), or may be throughout substantially the whole plant. Plants having an increased growth rate may have a shorter life cycle. The life cycle of a plant may be taken to mean the time needed to grow from a dry mature seed up to the stage where the plant has produced dry mature seeds, similar to the starting material. This life cycle may be influenced by factors such as speed of germination, early vigour, growth rate, greenness index, flowering time and speed of seed maturation. The increase in growth rate may take place at one or more stages in the life cycle of a plant or during substantially the whole plant life cycle. Increased growth rate during the early stages in the life cycle of a plant may reflect enhanced vigour. The increase in growth rate may alter the harvest cycle of a plant allowing plants to be sown later and/or harvested sooner than would otherwise be possible (a similar effect may be obtained with earlier flowering time). If the growth rate is sufficiently increased, it may allow for the further sowing of seeds of the same plant species (for example sowing and harvesting of rice plants followed by sowing and harvesting of further rice plants all within one conventional growing period). Similarly, if the growth rate is sufficiently increased, it may allow for the further sowing of seeds of different plants species (for example the sowing and harvesting of corn plants followed by, for example, the sowing and optional harvesting of soybean, potato or any other suitable plant). Harvesting additional times from the same rootstock in the case of some crop plants may also be possible. Altering the harvest cycle of a plant may lead to an increase in annual biomass production per square meter (due to an increase in the number of times (say in a year) that any particular plant may be grown and harvested). An increase in growth rate may also allow for the cultivation of transgenic plants in a wider geographical area than their wild-type counterparts, since the territorial limitations for growing a crop are often determined by adverse environmental conditions either at the time of planting (early season) or at the time of harvesting (late season). Such adverse conditions may be avoided if the harvest cycle is shortened. The growth rate may be determined by deriving various parameters from growth curves, such parameters may be: T-Mid (the time taken for plants to reach 50% of their maximal size) and T-90 (time taken for plants to reach 90% of their maximal size), amongst others.

[0307] According to a preferred feature of the present invention, performance of the methods of the invention gives plants having an increased growth rate relative to control plants. Therefore, according to the present invention, there is provided a method for increasing the growth rate of plants, which method comprises modulating expression in a plant of a nucleic acid encoding a CRSP33-like polypeptide, or an MCB polypeptide, or an SRT2 polypeptide, or an SPX-RING polypeptide, as defined herein.

[0308] Performance of the methods of the invention gives plants grown under non-stress conditions or under mild drought conditions increased yield relative to control plants grown under comparable conditions. Therefore, according to the present invention, there is provided a method for increasing yield in plants grown under non-stress conditions or under mild drought conditions, which method comprises modulating expression in a plant of a nucleic acid encoding a CRSP33-like polypeptide, or an MCB polypeptide, or an SRT2 polypeptide, or an SPX-RING polypeptide.

[0309] Performance of the methods of the invention gives plants grown under conditions of nutrient deficiency, particularly under conditions of nitrogen deficiency, increased yield relative to control plants grown under comparable conditions. Therefore, according to the present invention, there is provided a method for increasing yield in plants grown under conditions of nutrient deficiency, which method comprises modulating expression in a plant of a nucleic acid encoding a CRSP33-like polypeptide, or an MCB polypeptide, or an SRT2 polypeptide, or an SPX-RING polypeptide. Nutrient deficiency may result from a lack of nutrients such as nitrogen, phosphates and other phosphorous-containing compounds, potassium, calcium, magnesium, manganese, iron and boron, amongst others.

[0310] Performance of the methods of the invention gives plants grown under conditions of salt stress, increased yield relative to control plants grown under comparable conditions. Therefore, according to the present invention, there is provided a method for increasing yield in plants grown under conditions of salt stress, which method comprises modulating expression in a plant of a nucleic acid encoding a CRSP33-like polypeptide, or an MCB polypeptide, or an SRT2 polypeptide, or an SPX-RING polypeptide. The term salt stress is not restricted to common salt (NaCl), but may be any one or more of: NaCl, KCl, LiCl, MgCl₂, CaCl₂, amongst others.

[0311] The present invention encompasses plants or parts thereof (including seeds) obtainable by the methods according to the present invention. The plants or parts thereof comprise a nucleic acid transgene encoding a CRSP33-like polypeptide, or an MCB polypeptide, or an SRT2 polypeptide, or a YRP2 polypeptide, or a YRP3 polypeptide, or a YRP4 polypeptide, or an SPX-RING polypeptide, as defined above.

[0312] The invention also provides genetic constructs and vectors to facilitate introduction and/or expression in plants of nucleic acids encoding CRSP33-like polypeptides, or MCB polypeptides, or SRT2 polypeptides, or YRP2 polypeptides, or YRP3 polypeptides, or YRP4 polypeptides, or SPX-RING polypeptides. The gene constructs may be inserted into vectors, which may be commercially available, suitable for transforming into plants and suitable for expression of the gene of interest in the transformed cells. The invention also provides use of a gene construct as defined herein in the methods of the invention.

[0313] More specifically, the present invention provides a construct comprising:
[0314] (a) a nucleic acid encoding a CRSP33-like polypeptide, or an MCB polypeptide, or an SRT2 polypeptide, or a YRP2 polypeptide, or a YRP3 polypeptide, or a YRP4 polypeptide, or an SPX-RING polypeptide, as defined above;
[0315] (b) one or more control sequences capable of driving expression of the nucleic acid sequence of (a); and optionally
[0316] (c) a transcription termination sequence.

[0317] Preferably, the nucleic acid encoding a CRSP33-like polypeptide, or an MCB polypeptide, or an SRT2 polypeptide, or a YRP2 polypeptide, or a YRP3 polypeptide, or a YRP4 polypeptide, or an SPX-RING polypeptide, is as defined above. The term “control sequence” and “termination sequence” are as defined herein.

[0318] Plants are transformed with a vector comprising any of the nucleic acids described above. The skilled artisan is well aware of the genetic elements that must be present on the vector in order to successfully transform, select and propagate host cells containing the sequence of interest. The sequence of interest is operably linked to one or more control sequences (at least to a promoter).

[0319] Advantageously, any type of promoter, whether natural or synthetic, may be used to drive expression of the nucleic acid sequence, but preferably the promoter is of plant origin. A constitutive promoter is particularly useful in the methods. Preferably the constitutive promoter is also a ubiquitous promoter of medium strength. See the “Definitions” section herein for definitions of the various promoter types. Also useful in the methods of the invention is a root-specific promoter.

[0320] Concerning CRSP33-like polypeptides, it should be clear that the applicability of the present invention is not restricted to the CRSP33-like polypeptide-encoding nucleic acid represented by SEQ ID NO: 1, nor is the applicability of the invention restricted to expression of a CRSP33-like polypeptide-encoding nucleic acid when driven by a constitutive promoter.

[0321] The constitutive promoter is preferably a medium strength promoter, more preferably selected from a plant derived promoter, such as a GOS2 promoter, more preferably is the promoter GOS2 promoter from rice. Further preferably the constitutive promoter is represented by a nucleic acid sequence substantially similar to SEQ ID NO: 43, most preferably the constitutive promoter is as represented by SEQ ID NO: 43. See the “Definitions” section herein for further examples of constitutive promoters.

[0322] Optionally, one or more terminator sequences may be used in the construct introduced into a plant. Preferably, the construct comprises an expression cassette comprising a GOS2 promoter, substantially similar to SEQ ID NO: 43, and the nucleic acid encoding the CRSP33-like polypeptide.

[0323] Concerning MCB polypeptides, it should be clear that the applicability of the present invention is not restricted to the MCB polypeptide-encoding nucleic acid represented by SEQ ID NO: 44, nor is the applicability of the invention restricted to expression of an MCB polypeptide-encoding nucleic acid when driven by a constitutive promoter.

[0324] The constitutive promoter is preferably a medium strength promoter, more preferably selected from a plant derived promoter, such as a GOS2 promoter, more preferably is the promoter a GOS2 promoter from rice. Further preferably the constitutive promoter is represented by a nucleic acid sequence substantially similar to SEQ ID NO: 197, most preferably the constitutive promoter is as represented by SEQ ID NO: 197. See the “Definitions” section herein for further examples of constitutive promoters.

[0325] Optionally, one or more terminator sequences may be used in the construct introduced into a plant. Preferably, the construct comprises an expression cassette comprising a GOS2 promoter, substantially similar to SEQ ID NO: 197, and the nucleic acid encoding the MCB polypeptide.

[0326] Concerning SRT2 polypeptides, it should be clear that the applicability of the present invention is not restricted to the SRT2 polypeptide-encoding nucleic acid represented by SEQ ID NO: 198, nor is the applicability of the invention restricted to expression of a SRT2 polypeptide-encoding nucleic acid when driven by a constitutive promoter.

[0327] The constitutive promoter is preferably a medium strength promoter, more preferably selected from a plant derived promoter, such as a GOS2 promoter, more preferably is the promoter a GOS2 promoter from rice. Further preferably the constitutive promoter is represented by a nucleic acid sequence substantially similar to SEQ ID NO: 230, most preferably the constitutive promoter is as represented by SEQ ID NO: 230. See the “Definitions” section herein for further examples of constitutive promoters.

[0328] Optionally, one or more terminator sequences may be used in the construct introduced into a plant. Preferably, the construct comprises an expression cassette comprising a (name) promoter, substantially similar to SEQ ID NO: 230, and the nucleic acid encoding the SRT2 polypeptide.

[0329] Concerning YRP2 polypeptides, it should be clear that the applicability of the present invention is not restricted to the YRP2 polypeptide-encoding nucleic acid represented by SEQ ID NO: 235 SEQ ID NO: 237 or SEQ ID NO: 239 nor is the applicability of the invention restricted to expression of a YRP2 polypeptide-encoding nucleic acid when driven by a constitutive promoter.

[0330] The constitutive promoter is preferably a medium strength promoter, more preferably selected from a plant derived promoter, such as a GOS2 promoter, more preferably is the promoter a GOS2 promoter from rice. Further preferably the constitutive promoter is represented by a nucleic acid sequence substantially similar to SEQ ID NO: 241, most preferably the constitutive promoter is as represented by SEQ ID NO; 241. See the “Definitions” section herein for further examples of constitutive promoters.

[0331] Optionally, one or more terminator sequences may be used in the construct introduced into a plant. Preferably, the construct comprises an expression cassette comprising a (GOS2) promoter, substantially similar to SEQ ID NO: 241, and the nucleic acid encoding the YRP2 polypeptide.

[0332] Concerning YRP3 polypeptides, it should be clear that the applicability of the present invention is not restricted to the YRP3 polypeptide-encoding nucleic acid represented by SEQ ID NO: 244, SEQ ID NO: 246, SEQ ID NO: 248, SEQ ID NO: 250, SEQ ID NO: 252 or SEQ ID NO: 254, nor is the applicability of the invention restricted to expression of a YRP3 polypeptide-encoding nucleic acid when driven by a constitutive promoter.

[0333] The constitutive promoter is preferably a medium strength promoter, more preferably selected from a plant derived promoter, such as a GOS2 promoter, more preferably is the promoter a GOS2 promoter from rice. Further preferably the constitutive promoter is represented by a nucleic acid sequence substantially similar to SEQ ID NO: 256, most preferably the constitutive promoter is as represented by SEQ ID NO: 256. See the “Definitions” section herein for further examples of constitutive promoters.

[0334] Optionally, one or more terminator sequences may be used in the construct introduced into a plant. Preferably, the construct comprises an expression cassette comprising a (GOS2) promoter, substantially similar to SEQ ID NO: 256, and the nucleic acid encoding the YRP3 polypeptide.

[0335] Concerning YRP4 polypeptides, it should be clear that the applicability of the present invention is not restricted to the YRP4 polypeptide-encoding nucleic acid represented by SEQ ID NO: 261 or SEQ ID NO: 263, nor is the applicability of the invention restricted to expression of a YRP4 polypeptide-encoding nucleic acid when driven by a constitutive promoter.

[0336] The constitutive promoter is preferably a medium strength promoter, more preferably selected from a plant derived promoter, such as a GOS2 promoter, more preferably is the promoter a GOS2 promoter from rice. Further preferably the constitutive promoter is represented by a nucleic acid sequence substantially similar to SEQ ID NO: 265, most preferably the constitutive promoter is as represented by SEQ ID NO: 265. See the “Definitions” section herein for further examples of constitutive promoters.

[0337] Optionally, one or more terminator sequences may be used in the construct introduced into a plant. Preferably, the construct comprises an expression cassette comprising a (GOS2) promoter, substantially similar to SEQ ID NO: 265, and the nucleic acid encoding the YRP4 polypeptide.

[0338] Concerning SPX-RING polypeptides, it should be clear that the applicability of the present invention is not restricted to the SPX-RING polypeptide-encoding nucleic acid represented by SEQ ID NO: 270, nor is the applicability of the invention restricted to expression of a SPX-RING polypeptide-encoding nucleic acid when driven by a constitutive promoter.

[0339] The constitutive promoter is preferably a medium strength promoter, more preferably selected from a plant derived promoter, such as a GOS2 promoter, more preferably is the promoter a GOS2 promoter from rice. Further preferably the constitutive promoter is represented by a nucleic acid sequence substantially similar to SEQ ID NO: 447, most preferably the constitutive promoter is as represented by SEQ ID NO: 447. See the “Definitions” section herein for further examples of constitutive promoters.

[0340] Optionally, one or more terminator sequences may be used in the construct introduced into a plant. Preferably, the construct comprises an expression cassette comprising a (GOS2) promoter, substantially similar to SEQ ID NO: 447, and the nucleic acid encoding the SPX-RING polypeptide.

[0341] Additional regulatory elements may include transcriptional as well as translational enhancers. Those skilled in the art will be aware of terminator and enhancer sequences that may be suitable for use in performing the invention. An intron sequence may also be added to the 5′ untranslated region (UTR) or in the coding sequence to increase the amount of the mature message that accumulates in the cytosol, as described in the definitions section. Other control sequences (besides promoter, enhancer, silencer, intron sequences, 3′UTR and/or 5′UTR regions) may be protein and/or RNA stabilizing elements. Such sequences would be known or may readily be obtained by a person skilled in the art.

[0342] The genetic constructs of the invention may further include an origin of replication sequence that is required for maintenance and/or replication in a specific cell type. One example is when a genetic construct is required to be maintained in a bacterial cell as an episomal genetic element (e.g. plasmid or cosmid molecule). Preferred origins of replication include, but are not limited to, the f1-ori and colE1.

[0343] For the detection of the successful transfer of the nucleic acid sequences as used in the methods of the invention and/or selection of transgenic plants comprising these nucleic acids, it is advantageous to use marker genes (or reporter genes). Therefore, the genetic construct may optionally comprise a selectable marker gene. Selectable markers are described in more detail in the “definitions” section herein. The marker genes may be removed or excised from the transgenic cell once they are no longer needed. Techniques for marker removal are known in the art, useful techniques are described above in the definitions section.

[0344] The invention also provides a method for the production of transgenic plants having enhanced yield-related traits and/or abiotic stress tolerance relative to control plants, comprising introduction and expression in a plant of any nucleic acid encoding a CRSP33-like polypeptide, or an MCB polypeptide, or an SRT2 polypeptide, or a YRP2 polypeptide, or a YRP3 polypeptide, or a YRP4 polypeptide, or an SPX-RING polypeptide, as defined hereinabove.

[0345] More specifically, the present invention provides a method for the production of transgenic plants having enhanced yield-related traits, particularly increased (seed) yield, which method comprises:
[0346] (i) introducing and expressing in a plant or plant cell a nucleic acid encoding a CRSP33-like polypeptide, or an MCB polypeptide, or an SRT2 polypeptide, or an SPX-RING polypeptide; and
[0347] (ii) cultivating the plant cell under conditions promoting plant growth and development.

[0348] The nucleic acid of (i) may be any of the nucleic acids capable of encoding a CRSP33-like polypeptide, or an MCB polypeptide, or an SRT2 polypeptide, or an SPX-RING polypeptide, as defined herein.

[0349] More specifically, the present invention also provides a method for the production of transgenic plants having enhanced abiotic stress tolerance, particularly increased (mild) drought tolerance, which method comprises:
[0350] (i) introducing and expressing in a plant or plant cell a nucleic acid encoding a YRP2 polypeptide, or a YRP3 polypeptide, or a YRP4 polypeptide; and
[0351] (ii) cultivating the plant cell under abiotic stress conditions.

[0352] The nucleic acid of (i) may be any of the nucleic acids capable of encoding a YRP2 polypeptide, or a YRP3 polypeptide, or a YRP4 polypeptide, as defined herein.

[0353] The nucleic acid may be introduced directly into a plant cell or into the plant itself (including introduction into a tissue, organ or any other part of a plant). According to a preferred feature of the present invention, the nucleic acid is preferably introduced into a plant by transformation. The term “transformation” is described in more detail in the “definitions” section herein.

[0354] The genetically modified plant cells can be regenerated via all methods with which the skilled worker is familiar. Suitable methods can be found in the above-mentioned publications by S. D. Kung and R. Wu, Potrykus or Hofgen and Willmitzer.

[0355] Generally after transformation, plant cells or cell groupings are selected for the presence of one or more markers which are encoded by plant-expressible genes co-transferred with the gene of interest, following which the transformed material is regenerated into a whole plant. To select transformed plants, the plant material obtained in the transformation is, as a rule, subjected to selective conditions so that transformed plants can be distinguished from untransformed plants. For example, the seeds obtained in the above-described manner can be planted and, after an initial growing period, subjected to a suitable selection by spraying. A further possibility consists in growing the seeds, if appropriate after sterilization, on agar plates using a suitable selection agent so that only the transformed seeds can grow into plants. Alternatively, the transformed plants are screened for the presence of a selectable marker such as the ones described above.

[0356] Following DNA transfer and regeneration, putatively transformed plants may also be evaluated, for instance using Southern analysis, for the presence of the gene of interest, copy number and/or genomic organisation. Alternatively or additionally, expression levels of the newly introduced DNA may be monitored using Northern and/or Western analysis, both techniques being well known to persons having ordinary skill in the art.

[0357] The generated transformed plants may be propagated by a variety of means, such as by clonal propagation or classical breeding techniques. For example, a first generation (or T1) transformed plant may be selfed and homozygous second-generation (or T2) transformants selected, and the T2 plants may then further be propagated through classical breeding techniques. The generated transformed organisms may take a variety of forms. For example, they may be chimeras of transformed cells and non-transformed cells; clonal transformants (e.g., all cells transformed to contain the expression cassette); grafts of transformed and untransformed tissues (e.g., in plants, a transformed rootstock grafted to an untransformed scion).

[0358] The present invention clearly extends to any plant cell or plant produced by any of the methods described herein, and to all plant parts and propagules thereof. The present invention extends further to encompass the progeny of a primary transformed or transfected cell, tissue, organ or whole plant that has been produced by any of the aforementioned methods, the only requirement being that progeny exhibit the same genotypic and/or phenotypic characteristic(s) as those produced by the parent in the methods according to the invention.

[0359] The invention also includes host cells containing an isolated nucleic acid encoding a CRSP33-like polypeptide, or an MCB polypeptide, or an SRT2 polypeptide, or a YRP2 polypeptide, or a YRP3 polypeptide, or a YRP4 polypeptide, or an SPX-RING polypeptide, as defined hereinabove. Preferred host cells according to the invention are plant cells. Host plants for the nucleic acids or the vector used in the method according to the invention, the expression cassette or construct or vector are, in principle, advantageously all plants, which are capable of synthesizing the polypeptides used in the inventive method.

[0360] The methods of the invention are advantageously applicable to any plant. Plants that are particularly useful in the methods of the invention include all plants which belong to the superfamily Viridiplantae, in particular monocotyledonous and dicotyledonous plants including fodder or forage legumes, ornamental plants, food crops, trees or shrubs. According to a preferred embodiment of the present invention, the plant is a crop plant. Examples of crop plants include soybean, sunflower, canola, alfalfa, rapeseed, linseed, cotton, tomato, potato and tobacco. Further preferably, the plant is a monocotyledonous plant. Examples of monocotyledonous plants include sugarcane. More preferably the plant is a cereal. Examples of cereals include rice, maize, wheat, barley, millet, rye, triticale, sorghum, emmer, spelt, secale, einkorn, teff, milo and oats.

[0361] The invention also extends to harvestable parts of a plant such as, but not limited to seeds, leaves, fruits, flowers, stems, roots, rhizomes, tubers and bulbs, which harvestable parts comprise a recombinant nucleic acid encoding a CRSP33-like polypeptide, or an MCB polypeptide, or an SRT2 polypeptide, or a YRP2 polypeptide, or a YRP3 polypeptide, or a YRP4 polypeptide, or an SPX-RING polypeptide. The invention furthermore relates to products derived, preferably directly derived, from a harvestable part of such a plant, such as dry pellets or powders, oil, fat and fatty acids, starch or proteins.

[0362] According to a preferred feature of the invention, the modulated expression is increased expression. Methods for increasing expression of nucleic acids or genes, or gene products, are well documented in the art and examples are provided in the definitions section.

[0363] As mentioned above, a preferred method for modulating expression of a nucleic acid encoding a CRSP33-like polypeptide, or an MCB polypeptide, or an SRT2 polypeptide, or a YRP2 polypeptide, or a YRP3 polypeptide, or a YRP4 polypeptide, or an SPX-RING polypeptide, is by introducing and expressing in a plant a nucleic acid encoding a CRSP33-like polypeptide, or an MCB polypeptide, or an SRT2 polypeptide, or a YRP2 polypeptide, or a YRP3 polypeptide, or a YRP4 polypeptide, or an SPX-RING polypeptide; however the effects of performing the method, i.e. enhancing yield-related traits and/or abiotic stress tolerance may also be achieved using other well known techniques, including but not limited to T-DNA activation tagging, TILLING, homologous recombination. A description of these techniques is provided in the definitions section.

[0364] The present invention also encompasses use of nucleic acids encoding CRSP33-like polypeptides, or MCB polypeptides, or SRT2 polypeptides, or SPX-RING polypeptides, as described herein and use of these CRSP33-like polypeptides, or MCB polypeptides, or SRT2 polypeptides, or SPX-RING polypeptides, in enhancing any of the aforementioned yield-related traits in plants.

[0365] The present invention also encompasses use of nucleic acids encoding YRP2 polypeptides, or YRP3 polypeptides, or YRP4 polypeptides, as described herein and use of these YRP2 polypeptides, or YRP3 polypeptides, or YRP4 polypeptides, in enhancing any of the aforementioned abiotic stresses in plants.

[0366] Nucleic acids encoding CRSP33-like polypeptide, or MCB polypeptide, or SRT2 polypeptide, or YRP2 polypeptide, or YRP3 polypeptide, or YRP4 polypeptide, or SPX-RING polypeptide, described herein, or the CRSP33-like polypeptides, or the MCB polypeptides, or the SRT2 polypeptides, or the YRP2 polypeptides, or the YRP3 polypeptides, or the YRP4 polypeptides, or the SPX-RING polypeptides themselves, may find use in breeding programmes in which a DNA marker is identified which may be genetically linked to a gene encoding a CRSP33-like polypeptide, or an MCB polypeptide, or an SRT2 polypeptide, or a YRP2 polypeptide, or a YRP3 polypeptide, or a YRP4 polypeptide, or an SPX-RING polypeptide. The nucleic acids/genes, or the CRSP33-like polypeptides, or the MCB polypeptides, or the SRT2 polypeptides, or the YRP2 polypeptides, or the YRP3 polypeptides, or the YRP4 polypeptides, or the SPX-RING polypeptides themselves may be used to define a molecular marker. This DNA or protein marker may then be used in breeding programmes to select plants having enhanced yield-related traits and/or abiotic stress tolerance as defined hereinabove in the methods of the invention.

[0367] Allelic variants of a nucleic acid/gene encoding a CRSP33-like polypeptide, or an MCB polypeptide, or an SRT2 polypeptide, or a YRP2 polypeptide, or a YRP3 polypeptide, or a YRP4 polypeptide, or an SPX-RING polypeptide, may also find use in marker-assisted breeding programmes. Such breeding programmes sometimes require introduction of allelic variation by mutagenic treatment of the plants, using for example EMS mutagenesis; alternatively, the programme may start with a collection of allelic variants of so called “natural” origin caused unintentionally. Identification of allelic variants then takes place, for example, by PCR. This is followed by a step for selection of superior allelic variants of the sequence in question and which give increased yield. Selection is typically carried out by monitoring growth performance of plants containing different allelic variants of the sequence in question. Growth performance may be monitored in a greenhouse or in the field. Further optional steps include crossing plants in which the superior allelic variant was identified with another plant. This could be used, for example, to make a combination of interesting phenotypic features.

[0368] Nucleic acids encoding CRSP33-like polypeptides, or MCB polypeptides, or SRT2 polypeptides, or YRP2 polypeptides, or YRP3 polypeptides, or YRP4 polypeptides, or SPX-RING polypeptides, may also be used as probes for genetically and physically mapping the genes that they are a part of, and as markers for traits linked to those genes. Such information may be useful in plant breeding in order to develop lines with desired phenotypes. Such use of nucleic acids encoding CRSP33-like polypeptide, or MCB polypeptide, or SRT2 polypeptide, or YRP2 polypeptide, or YRP3 polypeptide, or YRP4 polypeptide, or SPX-RING polypeptide, requires only a nucleic acid sequence of at least 15 nucleotides in length. The nucleic acids encoding CRSP33-like polypeptide, or MCB polypeptide, or SRT2 polypeptide, or YRP2 polypeptide, or YRP3 polypeptide, or YRP4 polypeptide, or SPX-RING polypeptide, may be used as restriction fragment length polymorphism (RFLP) markers. Southern blots (Sambrook J, Fritsch EF and Maniatis T (1989) Molecular Cloning, A Laboratory Manual) of restriction-digested plant genomic DNA may be probed with the nucleic acids encoding CRSP33-like polypeptide, or MCB polypeptide, or SRT2 polypeptide, or YRP2 polypeptide, or YRP3 polypeptide, or YRP4 polypeptide, or SPX-RING polypeptide. The resulting banding patterns may then be subjected to genetic analyses using computer programs such as MapMaker (Lander et al. (1987) Genomics 1: 174-181) in order to construct a genetic map. In addition, the nucleic acids may be used to probe Southern blots containing restriction endonuclease-treated genomic DNAs of a set of individuals representing parent and progeny of a defined genetic cross. Segregation of the DNA polymorphisms is noted and used to calculate the position of the nucleic acid encoding CRSP33-like polypeptide, or MCB polypeptide, or SRT2 polypeptide, or YRP2 polypeptide, or YRP3 polypeptide, or YRP4 polypeptide, or SPX-RING polypeptide, in the genetic map previously obtained using this population (Botstein et al. (1980) Am. J. Hum. Genet. 32:314-331).

[0369] The production and use of plant gene-derived probes for use in genetic mapping is described in Bernatzky and Tanksley (1986) Plant Mol. Biol. Reporter 4: 37-41. Numerous publications describe genetic mapping of specific cDNA clones using the methodology outlined above or variations thereof. For example, F2 intercross populations, backcross populations, randomly mated populations, near isogenic lines, and other sets of individuals may be used for mapping. Such methodologies are well known to those skilled in the art.

[0370] The nucleic acid probes may also be used for physical mapping (i.e., placement of sequences on physical maps; see Hoheisel et al. In: Non-mammalian Genomic Analysis: A Practical Guide, Academic press 1996, pp. 319-346, and references cited therein).

[0371] In another embodiment, the nucleic acid probes may be used in direct fluorescence in situ hybridisation (FISH) mapping (Trask (1991) Trends Genet. 7:149-154). Although current methods of FISH mapping favour use of large clones (several kb to several hundred kb; see Laan et al. (1995) Genome Res. 5:13-20), improvements in sensitivity may allow performance of FISH mapping using shorter probes.

[0372] A variety of nucleic acid amplification-based methods for genetic and physical mapping may be carried out using the nucleic acids. Examples include allele-specific amplification (Kazazian (1989) J. Lab. Clin. Med 11:95-96), polymorphism of PCR-amplified fragments (CAPS; Sheffield et al. (1993) Genomics 16:325-332), allele-specific ligation (Landegren et al. (1988) Science 241:1077-1080), nucleotide extension reactions (Sokolov (1990) Nucleic Acid Res. 18:3671), Radiation Hybrid Mapping (Walter et al. (1997) Nat. Genet. 7:22-28) and Happy Mapping (Dear and Cook (1989) Nucleic Acid Res. 17:6795-6807). For these methods, the sequence of a nucleic acid is used to design and produce primer pairs for use in the amplification reaction or in primer extension reactions. The design of such primers is well known to those skilled in the art. In methods employing PCR-based genetic mapping, it may be necessary to identify DNA sequence differences between the parents of the mapping cross in the region corresponding to the instant nucleic acid sequence. This, however, is generally not necessary for mapping methods.

[0373] The methods according to the present invention result in plants having enhanced yield-related traits and/or abiotic stress tolerance, as described hereinbefore. These traits may also be combined with other economically advantageous traits, such as further yield-enhancing traits and/or as further abiotic or biotic stress tolerance-enhancing traits, enhanced yield-related traits and/or tolerance to other abiotic and biotic stresses, traits modifying various architectural features and/or biochemical and/or physiological features.

### Items:

### 1. Cofactor Required for Sp1 Activation (CRSP) Polypeptides

[0374] 1. A method for enhancing yield-related traits in plants relative to control plants, comprising modulating expression in a plant of a nucleic acid encoding a CRSP33-like polypeptide comprising any one or more of the following motifs:
   [0375] Motif I: YPPPPPFYRLYK or a motif having in increasing order of preference a motif having at least 50%, 55%, 60%, 65%, 70%, 75%, 80%, 85%, 90%, 95% or more sequence identity to Motif I;
   [0376] Motif II: QGVRQLYPKGP or a motif having in increasing order of preference a motif having at least 50%, 55%, 60%, 65%, 70%, 75%, 80%, 85%, 90%, 95% or more sequence identity to Motif II;
   [0377] Motif III: LNRELQLHILELADVLVERPSQYARRVE or a motif having in increasing order of preference a motif having at least 50%, 55%, 60%, 65%, 70%, 75%, 80%, 85%, 90%, 95% or more sequence identity to Motif III;
   [0378] Motif IV: IFKNLHHLLNSLRPHQARAT or a motif having in increasing order of preference a motif having at least 50%, 55%, 60%, 65%, 70%, 75%, 80%, 85%, 90%, 95% or more sequence identity to Motif IV.
[0379] 2. Method according to item 1, wherein said modulated expression is effected by introducing and expressing in a plant a nucleic acid encoding a CRSP33-like polypeptide.
[0380] 3. Method according to item 1 or 2, wherein said nucleic acid encoding a CRSP33-like polypeptide encodes any one of the proteins listed in Table A1 or is a portion of such a nucleic acid, or a nucleic acid capable of hybridising with such a nucleic acid.
[0381] 4. Method according to any one of items 1 to 4, wherein said nucleic acid sequence encodes an orthologue or paralogue of any of the proteins given in Table A1.
[0382] 5. Method according to any preceding item, wherein said enhanced yield-related traits comprise increased yield, preferably increased seed yield relative to control plants.
[0383] 6. Method according to any one of items 1 to 5, wherein said enhanced yield-related traits are obtained under non-stress conditions.
[0384] 7. Method according to any one of items 2 to 6, wherein said nucleic acid is operably linked to a constitutive promoter, preferably to a GOS2 promoter, most preferably to a GOS2 promoter from rice.
[0385] 8. Method according to any one of items 1 to 7, wherein said nucleic acid encoding a CRSP33-like polypeptide is of plant origin, preferably from a dicotyledonous plant, further preferably from the family Solanaceae, more preferably from Lycopersicum esculentum.
[0386] 9. Plant or part thereof, including seeds, obtainable by a method according to any one of items 1 to 8, wherein said plant or part thereof comprises a recombinant nucleic acid encoding a CRSP33-like polypeptide.
[0387] 10. Construct comprising:
   [0388] (i) nucleic acid encoding a cCRSP33-like polypeptide as defined in item 1;
   [0389] (ii) one or more control sequences capable of driving expression of the nucleic acid sequence of (i); and optionally
   [0390] (iii) a transcription termination sequence.
[0391] 11. Construct according to item 10, wherein one of said control sequences is a constitutive promoter, preferably a GOS2 promoter, most preferably a GOS2 promoter from rice.
[0392] 12. Use of a construct according to item 10 or 11 in a method for making plants having increased yield, particularly increased seed yield relative to control plants.
[0393] 13. Plant, plant part or plant cell transformed with a construct according to item 10 or 11.
[0394] 14. Method for the production of a transgenic plant having increased yield, particularly increased seed yield relative to control plants, comprising:
   [0395] (i) introducing and expressing in a plant a nucleic acid encoding a CRSP33-like polypeptide as defined in item 1; and
   [0396] (ii) cultivating the plant cell under conditions promoting plant growth and development.
[0397] 15. Transgenic plant having increased yield, particularly increased seed yield, relative to control plants, resulting from modulated expression of a nucleic acid encoding a CRSP33-like polypeptide as defined in item 1, or a transgenic plant cell derived from said transgenic plant.
[0398] 16. Transgenic plant according to item 9, 13 or 15, or a transgenic plant cell derived thereof, wherein said plant is a crop plant or a monocot or a cereal, such as rice, maize, wheat, barley, millet, rye, triticale, sorghum emmer, spelt, secale, einkorn, teff, milo and oats.
[0399] 17. Harvestable parts of a plant according to item 16, wherein said harvestable parts are preferably seeds.
[0400] 18. Products derived from a plant according to item 16 and/or from harvestable parts of a plant according to item 17.
[0401] 19. Use of a nucleic acid encoding a CRSP33-like polypeptide in increasing yield, particularly in increasing seed yield, relative to control plants.

### 2. Myb-Related CAB Promoter-Binding (MCB) Polypeptides

[0402] 1. A method for enhancing yield-related traits in plants relative to control plants, comprising modulating expression in a plant of a nucleic acid encoding MCB polypeptide.
[0403] 2. Method according to item 1, wherein said MCB polypeptide comprises one or more motifs having in increasing order of preference at least 50%, 51%, 52%, 53%, 54%, 55%, 56%, 57%, 58%, 59%, 60%, 61%, 62%, 63%, 64%, 65%, 66%, 67%, 68%, 69%, 70%, 71%, 72%, 73%, 74%, 75%, 76%, 77%, 78%, 79%, 80%, 81%, 82%, 83%, 84%, 85%, 86%, 87%, 88%, 89%, 90%, 91%, 92%, 93%, 94%, 95%, 96%, 97%, 98%, or 99% sequence identity to any one or more of the following motifs:

(i) Motif 1:
(SEQ ID NO: 188)
WTEEEH[RK][KT]FL[AED]GL[ERK][QK]LGKGDWRGI[SA]K[NG]
ASHAQKYFLRQTN;
(ii) Motif 2:
(SEQ ID NO: 189)
P[GN][KM]KKRR[AS]SLFD[VM][GM][IPA][ARP][DEA][LGY]
[SHK][PD][ANTY];
(iii) Motif 3:
(SEQ ID NO: 190)
[GLA][AGS][LST][GMP]Q[QSL][KS][RG][RK]RR[KR]AQ[ED]
RKK[GA][IV]P;
(iv) Motif 4:
(SEQ ID NO: 191)
WTEEEHR[ML]FLLGLQKLGKGDWRGI[SA]RN[YF]V[VIT][ST]
RTPTQVASHAQKYFIRQ[ST]N;
(v) Motif 5:
(SEQ ID NO: 192)
[RK]RKRRSSLFD[MI]V[AP]D[ED];
(vi) Motif 6:
(SEQ ID NO: 193)
RRCSHC[SG][HN]NGHNSRT;
(vii) Motif 7
(SEQ ID NO: 194)
(SHAQKYF.

wherein amino acids between brackets represent alternative amino acids at the position.
[0404] 3. Method according to item 1 or 2, wherein said modulated expression is effected by introducing and expressing in a plant a nucleic acid encoding an MCB polypeptide.
[0405] 4. Method according to any one of items 1 to 3, wherein said nucleic acid encoding an MCB polypeptide encodes any one of the proteins listed in Table A2 or is a portion of such a nucleic acid, or a nucleic acid capable of hybridising with such a nucleic acid.
[0406] 5. Method according to any one of items 1 to 4, wherein said nucleic acid sequence encodes an orthologue or paralogue of any of the proteins given in Table A2.
[0407] 6. Method according to any preceding item, wherein said enhanced yield-related traits comprise increased yield, preferably increased biomass and/or increased seed yield relative to control plants.
[0408] 7. Method according to any one of items 1 to 6, wherein said enhanced yield-related traits are obtained under non-stress conditions.
[0409] 8. Method according to any one of items 1 to 6, wherein said enhanced yield-related traits are obtained under conditions of drought stress, salt stress or nitrogen deficiency.
[0410] 9. Method according to any one of items 3 to 8, wherein said nucleic acid is operably linked to a constitutive promoter, preferably to a GOS2 promoter, most preferably to a GOS2 promoter from rice.
[0411] 10. Method according to any one of items 1 to 9, wherein said nucleic acid encoding an MCB polypeptide is of plant origin, preferably from a dicotyledonous plant, further preferably from the family Brassicaceae, more preferably from the genus Arabidopsis, most preferably from Arabidopsis thaliana.
[0412] 11. Plant or part thereof, including seeds, obtainable by a method according to any one of items 1 to 10, wherein said plant or part thereof comprises a recombinant nucleic acid encoding MCB polypeptide.
[0413] 12. Construct comprising:
   [0414] (i) nucleic acid encoding MCB polypeptide as defined in items 1 or 2;
   [0415] (ii) one or more control sequences capable of driving expression of the nucleic acid sequence of (a); and optionally
   [0416] (iii) a transcription termination sequence.
[0417] 13. Construct according to item 12, wherein one of said control sequences is a constitutive promoter, preferably a GOS2 promoter, most preferably a GOS2 promoter from rice.
[0418] 14. Use of a construct according to item 12 or 13 in a method for making plants having increased yield, particularly increased biomass and/or increased seed yield relative to control plants.
[0419] 15. Plant, plant part or plant cell transformed with a construct according to item 12 or 13.
[0420] 16. Method for the production of a transgenic plant having increased yield, particularly increased biomass and/or increased seed yield relative to control plants, comprising:
   [0421] (i) introducing and expressing in a plant a nucleic acid encoding MCB polypeptide as defined in item 1 or 2; and
   [0422] (ii) cultivating the plant cell under conditions promoting plant growth and development.
[0423] 17. Transgenic plant having increased yield, particularly increased biomass and/or increased seed yield, relative to control plants, resulting from modulated expression of a nucleic acid encoding MCB polypeptide as defined in item 1 or 2, or a transgenic plant cell derived from said transgenic plant.
[0424] 18. Transgenic plant according to item 11, 15 or 17, or a transgenic plant cell derived thereof, wherein said plant is a crop plant or a monocot or a cereal, such as rice, maize, wheat, barley, millet, rye, triticale, sorghum emmer, spelt, secale, einkorn, teff, milo and oats.
[0425] 19. Harvestable parts of a plant according to item 18, wherein said harvestable parts are preferably shoot biomass and/or seeds.
[0426] 20. Products derived from a plant according to item 18 and/or from harvestable parts of a plant according to item 19.
[0427] 21. Use of a nucleic acid encoding MCB polypeptide in increasing yield, particularly in increasing seed yield and/or shoot biomass in plants, relative to control plants.

### 3. Sirtuin 2 or Silent Information Regulator 2 (SRT2) Polypeptides

[0428] 1. A method for enhancing yield-related traits in plants relative to control plants, comprising modulating expression in a plant of a nucleic acid encoding a SRT2 polypeptide.
[0429] 2. Method according to item 1, wherein said SRT2 polypeptide comprises a protein domain having in increasing order of preference at least 50%, 51%, 52%, 53%, 54%, 55%, 56%, 57%, 58%, 59%, 60%, 61%, 62%, 63%, 64%, 65%, 66%, 67%, 68%, 69%, 70%, 71%, 72%, 73%, 74%, 75%, 76%, 77%, 78%, 79%, 80%, 81%, 82%, 83%, 84%, 85%, 86%, 87%, 88%, 89%, 90%, 91%, 92%, 93%, 94%, 95%, 96%, 97%, 98%, or 99% overall sequence identity to any one or more of the amino acid domains set forth in Table C1.
[0430] 3. Method according to item 1 or 2, wherein said modulated expression is effected by introducing and expressing in a plant a nucleic acid encoding a SRT2 polypeptide.
[0431] 4. Method according to any one of items 1 to 3, wherein said nucleic acid encoding a SRT2 polypeptide encodes any one of the proteins listed in Table A3 or is a portion of such a nucleic acid, or a nucleic acid capable of hybridising with such a nucleic acid.
[0432] 5. Method according to any one of items 1 to 4, wherein said nucleic acid sequence encodes an orthologue or paralogue of any of the proteins given in Table A3.
[0433] 6. Method according to any preceding item, wherein said enhanced yield-related traits comprise increased yield, preferably increased biomass and/or increased seed yield relative to control plants.
[0434] 7. Method according to any one of items 1 to 6, wherein said enhanced yield-related traits are obtained under non-stress conditions.
[0435] 8. Method according to any one of items 1 to 6, wherein said enhanced yield-related traits are obtained under conditions of drought stress, salt stress or nitrogen deficiency.
[0436] 9. Method according to any one of items 3 to 8, wherein said nucleic acid is operably linked to a constitutive promoter, preferably to a GOS2 promoter, most preferably to a GOS2 promoter from rice.
[0437] 10. Method according to any one of items 1 to 9, wherein said nucleic acid encoding a SRT2 polypeptide is of plant origin, preferably from a dicotyledonous plant, further preferably from the family Brassicaceae, more preferably from the genus Arabidopsis, most preferably from Arabidopsis thaliana.
[0438] 11. Plant or part thereof, including seeds, obtainable by a method according to any one of items 1 to 10, wherein said plant or part thereof comprises a recombinant nucleic acid encoding a SRT2 polypeptide.
[0439] 12. Construct comprising:
   [0440] (i) nucleic acid encoding a SRT2 polypeptide as defined in items 1 or 2;
   [0441] (ii) one or more control sequences capable of driving expression of the nucleic acid sequence of (a); and optionally
   [0442] (iii) a transcription termination sequence.
[0443] 13. Construct according to item 12, wherein one of said control sequences is a constitutive promoter, preferably a GOS2 promoter, most preferably a GOS2 promoter from rice.
[0444] 14. Use of a construct according to item 12 or 13 in a method for making plants having increased yield, particularly increased biomass and/or increased seed yield relative to control plants.
[0445] 15. Plant, plant part or plant cell transformed with a construct according to item 12 or 13.
[0446] 16. Method for the production of a transgenic plant having increased yield, particularly increased biomass and/or increased seed yield relative to control plants, comprising:
   [0447] (i) introducing and expressing in a plant a nucleic acid encoding a SRT2 polypeptide as defined in item 1 or 2; and
   [0448] (ii) cultivating the plant cell under conditions promoting plant growth and development.
[0449] 17. Transgenic plant having increased yield, particularly increased biomass and/or increased seed yield, relative to control plants, resulting from modulated expression of a nucleic acid encoding a SRT2 polypeptide as defined in item 1 or 2, or a transgenic plant cell derived from said transgenic plant.
[0450] 18. Transgenic plant according to item 11, 15 or 17, or a transgenic plant cell derived thereof, wherein said plant is a crop plant or a monocot or a cereal, such as rice, maize, wheat, barley, millet, rye, triticale, sorghum emmer, spelt, secale, einkorn, teff, milo and oats.
[0451] 19. Harvestable parts of a plant according to item 18, wherein said harvestable parts are preferably shoot biomass and/or seeds.
[0452] 20. Products derived from a plant according to item 18 and/or from harvestable parts of a plant according to item 19.
[0453] 21. Use of a nucleic acid encoding a SRT2 polypeptide in increasing yield, particularly in increasing seed yield and/or shoot biomass in plants, relative to control plants.

### 4. YRP2 Polypeptides

[0454] 1. Method for enhancing abiotic stress tolerance in plants by modulating expression in a plant of a nucleic acid encoding a YRP2 polypeptide or an orthologue or paralogue thereof.
[0455] 2. Method according to item 1, wherein said modulated expression is effected by introducing and expressing in a plant a nucleic acid encoding YRP2 polypeptide.
[0456] 3. Method according to items 1 or 2, wherein said nucleic acid encoding a YRP2 polypeptide encodes any one of the proteins listed in Table A4 or is a portion of such a nucleic acid, or a nucleic acid capable of hybridising with such a nucleic acid.
[0457] 4. Method according to any one of items 1 to 3, wherein said nucleic acid sequence encodes an orthologue or paralogue of any of the proteins given in Table A4.
[0458] 5. Method according to items 3 or 4, wherein said nucleic acid is operably linked to a constitutive promoter, preferably to a GOS2 promoter, most preferably to a GOS2 promoter from rice.
[0459] 6. Method according to any one of items 1 to 5, wherein said nucleic acid encoding a YRP2 polypeptide is of Solanum lycopersicon.
[0460] 7. Plant or part thereof, including seeds, obtainable by a method according to any one of items 1 to 6, wherein said plant or part thereof comprises a recombinant nucleic acid encoding a YRP2 polypeptide.
[0461] 8. Construct comprising:
   [0462] (i) nucleic acid encoding a YRP2 polypeptide as defined in items 1 or 2;
   [0463] (ii) one or more control sequences capable of driving expression of the nucleic acid sequence of (a); and optionally
   [0464] (iii) a transcription termination sequence.
[0465] 9. Construct according to item 8, wherein one of said control sequences is a constitutive promoter, preferably a GOS2 promoter, most preferably a GOS2 promoter from rice.
[0466] 10. Use of a construct according to item 8 or 9 in a method for making plants having increased abiotic stress tolerance relative to control plants.
[0467] 11. Plant, plant part or plant cell transformed with a construct according to item 8 or 9.
[0468] 12. Method for the production of a transgenic plant having increased abiotic stress tolerance relative to control plants, comprising:
   [0469] (i) introducing and expressing in a plant a nucleic acid encoding a YRP2 polypeptide; and
   [0470] (ii) cultivating the plant cell under conditions promoting abiotic stress.
[0471] 13. Transgenic plant having abiotic stress tolerance, relative to control plants, resulting from modulated expression of a nucleic acid encoding a YRP2 polypeptide, or a transgenic plant cell derived from said transgenic plant.
[0472] 14. Transgenic plant according to item 7, 11 or 13, or a transgenic plant cell derived thereof, wherein said plant is a crop plant or a monocot or a cereal, such as rice, maize, wheat, barley, millet, rye, triticale, sorghum, sugarcane, emmer, spelt, secale, einkorn, teff, milo and oats.
[0473] 15. Harvestable parts of a plant according to item 14, wherein said harvestable parts are preferably shoot biomass and/or seeds.
[0474] 16. Products derived from a plant according to item 14 and/or from harvestable parts of a plant according to item 15.
[0475] 17. Use of a nucleic acid encoding a YRP2 polypeptide in increasing yield, particularly in increasing abiotic stress tolerance, relative to control plants.

### 5. YRP3 Polypeptides

[0476] 1. Method for enhancing abiotic stress tolerance in plants by modulating expression in a plant of a nucleic acid encoding a YRP3 polypeptide or an orthologue or paralogue thereof.
[0477] 2. Method according to item 1, wherein said modulated expression is effected by introducing and expressing in a plant a nucleic acid encoding YRP3 polypeptide.
[0478] 3. Method according to items 1 or 2, wherein said nucleic acid encoding a YRP3 polypeptide encodes any one of the proteins listed in Table A5 or is a portion of such a nucleic acid, or a nucleic acid capable of hybridising with such a nucleic acid.
[0479] 4. Method according to any one of items 1 to 3, wherein said nucleic acid sequence encodes an orthologue or paralogue of any of the proteins given in Table A5.
[0480] 5. Method according to items 3 or 4, wherein said nucleic acid is operably linked to a constitutive promoter, preferably to a GOS2 promoter, most preferably to a GOS2 promoter from rice.
[0481] 6. Method according to any one of items 1 to 5, wherein said nucleic acid encoding a YRP3 polypeptide is of Physcomitrella patens.
[0482] 7. Plant or part thereof, including seeds, obtainable by a method according to any one of items 1 to 6, wherein said plant or part thereof comprises a recombinant nucleic acid encoding a YRP3 polypeptide.
[0483] 8. Construct comprising:
   [0484] (i) nucleic acid encoding a YRP3 polypeptide as defined in items 1 or 2;
   [0485] (ii) one or more control sequences capable of driving expression of the nucleic acid sequence of (a); and optionally
   [0486] (iii) a transcription termination sequence.
[0487] 9. Construct according to item 8, wherein one of said control sequences is a constitutive promoter, preferably a GOS2 promoter, most preferably a GOS2 promoter from rice.
[0488] 10. Use of a construct according to item 8 or 9 in a method for making plants having increased abiotic stress tolerance relative to control plants.
[0489] 11. Plant, plant part or plant cell transformed with a construct according to item 8 or 9.
[0490] 12. Method for the production of a transgenic plant having increased abiotic stress tolerance relative to control plants, comprising:
   [0491] (i) introducing and expressing in a plant a nucleic acid encoding a YRP3 polypeptide; and
   [0492] (ii) cultivating the plant cell under conditions promoting abiotic stress.
[0493] 13. Transgenic plant having abiotic stress tolerance, relative to control plants, resulting from modulated expression of a nucleic acid encoding a YRP3 polypeptide, or a transgenic plant cell derived from said transgenic plant.
[0494] 14. Transgenic plant according to item 7, 11 or 13, or a transgenic plant cell derived thereof, wherein said plant is a crop plant or a monocot or a cereal, such as rice, maize, wheat, barley, millet, rye, triticale, sorghum, sugarcane, emmer, spelt, secale, einkorn, teff, milo and oats.
[0495] 15. Harvestable parts of a plant according to item 14, wherein said harvestable parts are preferably shoot biomass and/or seeds.
[0496] 16. Products derived from a plant according to item 14 and/or from harvestable parts of a plant according to item 15.
[0497] 17. Use of a nucleic acid encoding a YRP3 polypeptide in increasing yield, particularly in increasing abiotic stress tolerance, relative to control plants.

### 5. YRP3 Polypeptides

[0498] 1. Method for enhancing abiotic stress tolerance in plants by modulating expression in a plant of a nucleic acid encoding a YRP4 polypeptide or an orthologue or paralogue thereof.
[0499] 2. Method according to item 1, wherein said modulated expression is effected by introducing and expressing in a plant a nucleic acid encoding YRP4 polypeptide.
[0500] 3. Method according to items 1 or 2, wherein said nucleic acid encoding a YRP4 polypeptide encodes any one of the proteins listed in Table A6 or is a portion of such a nucleic acid, or a nucleic acid capable of hybridising with such a nucleic acid.
[0501] 4. Method according to any one of items 1 to 3, wherein said nucleic acid sequence encodes an orthologue or paralogue of any of the proteins given in Table A6.
[0502] 5. Method according to items 3 or 4, wherein said nucleic acid is operably linked to a constitutive promoter, preferably to a GOS2 promoter, most preferably to a GOS2 promoter from rice.
[0503] 6. Method according to any one of items 1 to 5, wherein said nucleic acid encoding a YRP4 polypeptide is of Triticum aestivum.
[0504] 7. Plant or part thereof, including seeds, obtainable by a method according to any one of items 1 to 6, wherein said plant or part thereof comprises a recombinant nucleic acid encoding a YRP4 polypeptide.
[0505] 8. Construct comprising:
   [0506] (i) nucleic acid encoding a YRP4 polypeptide as defined in items 1 or 2;
   [0507] (ii) one or more control sequences capable of driving expression of the nucleic acid sequence of (a); and optionally
   [0508] (iii) a transcription termination sequence.
[0509] 9. Construct according to item 8, wherein one of said control sequences is a constitutive promoter, preferably a GOS2 promoter, most preferably a GOS2 promoter from rice.
[0510] 10. Use of a construct according to item 8 or 9 in a method for making plants having increased abiotic stress tolerance relative to control plants.
[0511] 11. Plant, plant part or plant cell transformed with a construct according to item 8 or 9.
[0512] 12. Method for the production of a transgenic plant having increased abiotic stress tolerance relative to control plants, comprising:
   [0513] (i) introducing and expressing in a plant a nucleic acid encoding a YRP4 polypeptide; and
   [0514] (ii) cultivating the plant cell under conditions promoting abiotic stress.
[0515] 13. Transgenic plant having abiotic stress tolerance, relative to control plants, resulting from modulated expression of a nucleic acid encoding a YRP4 polypeptide, or a transgenic plant cell derived from said transgenic plant.
[0516] 14. Transgenic plant according to item 7, 11 or 13, or a transgenic plant cell derived thereof, wherein said plant is a crop plant or a monocot or a cereal, such as rice, maize, wheat, barley, millet, rye, triticale, sorghum, sugarcane, emmer, spelt, secale, einkorn, teff, milo and oats.
[0517] 15. Harvestable parts of a plant according to item 14, wherein said harvestable parts are preferably shoot biomass and/or seeds.
[0518] 16. Products derived from a plant according to item 14 and/or from harvestable parts of a plant according to item 15.
[0519] 17. Use of a nucleic acid encoding a YRP4 polypeptide in increasing yield, particularly in increasing abiotic stress tolerance, relative to control plants.

### 7. SPX-RING (SYG1, Pho81, XPR1-Zinc Finger, RING-Type) Polypeptides

[0520] 1. A method for enhancing yield-related traits in plants relative to control plants, comprising modulating expression in a plant of a nucleic acid encoding an SPX-RING polypeptide.
[0521] 2. Method according to item 1, wherein said SPX-RING polypeptide comprises a motif having in increasing order of preference at least 50%, 51%, 52%, 53%, 54%, 55%, 56%, 57%, 58%, 59%, 60%, 61%, 62%, 63%, 64%, 65%, 66%, 67%, 68%, 69%, 70%, 71%, 72%, 73%, 74%, 75%, 76%, 77%, 78%, 79%, 80%, 81%, 82%, 83%, 84%, 85%, 86%, 87%, 88%, 89%, 90%, 91%, 92%, 93%, 94%, 95%, 96%, 97%, 98%, or 99% overall sequence identity to any one or more of:
   [0522] (i) Motifs 1-1 to Motifs 1-35 (SEQ ID NO: 340 to 374); and
   [0523] (ii) Motifs 2-1 to Motifs 2-35 (SEQ ID NO: 375 to 409); and
   [0524] (iii) Motifs 3-1 to Motifs 3-35 (SEQ ID NO: 410 to 444).
[0525] 3. Method according to item 1 or 2, wherein said modulated expression is effected by introducing and expressing in a plant a nucleic acid encoding an SPX-RING polypeptide.
[0526] 4. Method according to any one of items 1 to 3, wherein said nucleic acid encoding an SPX-RING polypeptide encodes any one of the proteins listed in Table A7 or is a portion of such a nucleic acid, or a nucleic acid capable of hybridising with such a nucleic acid.
[0527] 5. Method according to any one of items 1 to 4, wherein said nucleic acid sequence encodes an orthologue or paralogue of any of the proteins given in Table A7.
[0528] 6. Method according to any preceding item, wherein said enhanced yield-related traits comprise increased yield, preferably increased biomass and/or increased seed yield relative to control plants.
[0529] 7. Method according to any one of items 1 to 6, wherein said enhanced yield-related traits are obtained under non-stress conditions.
[0530] 8. Method according to any one of items 1 to 6, wherein said enhanced yield-related traits are obtained under conditions of drought stress, salt stress or nitrogen deficiency.
[0531] 9. Method according to any one of items 3 to 8, wherein said nucleic acid is operably linked to a constitutive promoter, preferably to a GOS2 promoter, most preferably to a GOS2 promoter from rice.
[0532] 10. Method according to any one of items 1 to 9, wherein said nucleic acid encoding an SPX-RING polypeptide is of plant origin, preferably from a dicotyledonous plant, further preferably from the family Brassicaceae, more preferably from the genus Arabidopsis, most preferably from Arabidopsis thaliana.
[0533] 11. Plant or part thereof, including seeds, obtainable by a method according to any one of items 1 to 10, wherein said plant or part thereof comprises a recombinant nucleic acid encoding an SPX-RING polypeptide.
[0534] 12. Construct comprising:
   [0535] (i) nucleic acid encoding an SPX-RING polypeptide as defined in items 1 or 2;
   [0536] (ii) one or more control sequences capable of driving expression of the nucleic acid sequence of (a); and optionally
   [0537] (iii) a transcription termination sequence.
[0538] 13. Construct according to item 12, wherein one of said control sequences is a constitutive promoter, preferably a GOS2 promoter, most preferably a GOS2 promoter from rice.
[0539] 14. Use of a construct according to item 12 or 13 in a method for making plants having increased yield, particularly increased biomass and/or increased seed yield relative to control plants.
[0540] 15. Plant, plant part or plant cell transformed with a construct according to item 12 or 13.
[0541] 16. Method for the production of a transgenic plant having increased yield, particularly increased biomass and/or increased seed yield relative to control plants, comprising:
   [0542] (i) introducing and expressing in a plant a nucleic acid encoding an SPX-RING polypeptide as defined in item 1 or 2; and
   [0543] (ii) cultivating the plant cell under conditions promoting plant growth and development.
[0544] 17. Transgenic plant having increased yield, particularly increased biomass and/or increased seed yield, relative to control plants, resulting from modulated expression of a nucleic acid encoding an SPX-RING polypeptide as defined in item 1 or 2, or a transgenic plant cell derived from said transgenic plant.
[0545] 18. Transgenic plant according to item 11, 15 or 17, or a transgenic plant cell derived thereof, wherein said plant is a crop plant or a monocot or a cereal, such as rice, maize, wheat, barley, millet, rye, triticale, sorghum emmer, spelt, secale, einkorn, teff, milo and oats.
[0546] 19. Harvestable parts of a plant according to item 18, wherein said harvestable parts are preferably shoot biomass and/or seeds.
[0547] 20. Products derived from a plant according to item 18 and/or from harvestable parts of a plant according to item 19.
[0548] 21. Use of a nucleic acid encoding an SPX-RING polypeptide in increasing yield, particularly in increasing seed yield and/or shoot biomass in plants, relative to control plants.

### DESCRIPTION OF FIGURES

[0549] The present invention will now be described with reference to the following figures in which:

[0550] FIG. 1 shows a multiple alignment with Motifs I to IV boxed. Alignment of polypeptide sequences was performed using the ClustalW 2.0 algorithm of progressive alignment (Thompson et al. (1997) Nucleic Acids Res 25:4876-4882; Chema et al. (2003). Nucleic Acids Res 31:3497-3500) with standard setting (slow alignment, similarity matrix: Gonnet (or Blosum 62) gap opening penalty 10, gap extension penalty: 0.2). Minor manual editing was done to further optimise the alignment.

[0551] FIG. 2 shows a phylogenetic tree of CRSP33-like polypeptides constructed using a neighbour-joining clustering algorithm as provided in the AlignX programme from the Vector NTI (Invitrogen).

[0552] FIG. 3 represents the binary vector used for increased expression in Oryza sativa of a CRSP33-like-encoding nucleic acid under the control of a rice GOS2 promoter (pGOS2).

[0553] FIG. 4 represents a multiple alignment of MCB polypeptide of group MCB1 of Table A2.

[0554] FIG. 5 represents the binary vector used for increased expression in Oryza sativa of a MCB-encoding nucleic acid under the control of a rice GOS2 promoter (pGOS2)

[0555] FIG. 6 represents a multiple alignment of SRT2 polypeptides.

[0556] FIG. 7 represents the binary vector used for increased expression in Oryza sativa of a SRT2-encoding nucleic acid under the control of a rice GOS2 promoter (pGOS2)

[0557] FIG. 8 represents the binary vector used for increased expression in Oryza sativa of a YRP2-encoding nucleic acid under the control of a rice GOS2 promoter (pGOS2)

[0558] FIG. 9 represents the binary vector used for increased expression in Oryza sativa of a YRP3-encoding nucleic acid under the control of a rice GOS2 promoter (pGOS2)

[0559] FIG. 10 represents the binary vector used for increased expression in Oryza sativa of a YRP4-encoding nucleic acid under the control of a rice GOS2 promoter (pGOS2)

[0560] FIG. 11 represents a multiple alignment of SPX-RING polypeptides.

[0561] FIG. 12 represents the binary vector used for increased expression in Oryza sativa of a SPX-RING-encoding nucleic acid under the control of a rice GOS2 promoter (pGOS2)

### EXAMPLES

[0562] The present invention will now be described with reference to the following examples, which are by way of illustration alone. The following examples are not intended to completely define or otherwise limit the scope of the invention.

[0563] DNA manipulation: unless otherwise stated, recombinant DNA techniques are performed according to standard protocols described in (Sambrook (2001) Molecular Cloning: a laboratory manual, 3rd Edition Cold Spring Harbor Laboratory Press, CSH, New York) or in Volumes 1 and 2 of Ausubel et al. (1994), Current Protocols in Molecular Biology, Current Protocols. Standard materials and methods for plant molecular work are described in Plant Molecular Biology Labfax (1993) by R. D. D. Croy, published by BIOS Scientific Publications Ltd (UK) and Blackwell Scientific Publications (UK).

### Example 1

### Identification of Sequences Related to the Nucleic Acid Sequence Used in the Methods of the Invention

### 1.1. Cofactor Required for Sp1 Activation (CRSP) Polypeptides

[0564] Sequences (full length cDNA, ESTs or genomic) related to SEQ ID NOs 1 and 3 were identified amongst those maintained in the Entrez Nucleotides database at the National Center for Biotechnology Information (NCBI) using database sequence search tools, such as the Basic Local Alignment Tool (BLAST) (Altschul et al. (1990) J. Mol. Biol. 215:403-410; and Altschul et al. (1997) Nucleic Acids Res. 25:3389-3402). The program was used to find regions of local similarity between sequences by comparing nucleic acid or polypeptide sequences to sequence databases and by calculating the statistical significance of matches. For example, the polypeptide encoded by SEQ ID NO: 1 was used for the TBLASTN algorithm, with default settings and the filter to ignore low complexity sequences set off. The output of the analysis was viewed by pairwise comparison, and ranked according to the probability score (E-value), where the score reflects the probability that a particular alignment occurs by chance (the lower the E-value, the more significant the hit). In addition to E-values, comparisons were also scored by percentage identity. Percentage identity refers to the number of identical nucleotides (or amino acids) between the two compared nucleic acid (or polypeptide) sequences over a particular length. In some instances, the default parameters were adjusted to modify the stringency of the search. For example the E-value may be increased to show less stringent matches. This way, short nearly exact matches can be identified. Table A1 below provides a list of CRSP33-like nucleic acid sequences

TABLE A1
Examples of CRSP33-like polypeptides:

| | Nucleic acid | Polypeptide |
|---|---|---|
| Name | SEQ ID NO | SEQ ID NO |
| Le_CRSP33 | 1 | 2 |
| Os_CRSP33 | 3 | 4 |
| AT5G03500.2#1 | 5 | 20 |
| AT5G03500.1#1 | 6 | 21 |
| AT5G03220.1#1 | 7 | 22 |
| BN06MC22344 48149483@22265#1 | 8 | 23 |
| GM06MCO2774 49755818@2753#1 | 9 | 24 |
| TA38948 4513#1 | 10 | 25 |
| HV04MC03499 62749311@3496#1 | 11 | 26 |
| DY617270#1 | 12 | 27 |
| TA26316 3880#1 | 13 | 28 |
| Os04g0661800#1 | 14 | 29 |
| Os04g56640.1#1 | 15 | 30 |
| TA23778 3218#1 | 16 | 31 |
| Scaff XVI.558#1 | 17 | 32 |
| TA49665 4081#1 | 18 | 33 |
| TA60756 4565#1 | 19 | 34 |

### 1.2. Myb-Related CAB Promoter-Binding (MCB) Polypeptides

[0565] Sequences (full length cDNA, ESTs or genomic) related to the nucleic acid sequence used in the methods of the present invention were identified amongst those maintained in the Entrez Nucleotides database at the National Center for Biotechnology Information (NCBI) using database sequence search tools, such as the Basic Local Alignment Tool (BLAST) (Altschul et al. (1990) J. Mol. Biol. 215:403-410; and Altschul et al. (1997) Nucleic Acids Res. 25:3389-3402). The program is used to find regions of local similarity between sequences by comparing nucleic acid or polypeptide sequences to sequence databases and by calculating the statistical significance of matches. For example, the polypeptide encoded by the nucleic acid used in the present invention was used for the TBLASTN algorithm, with default settings and the filter to ignore low complexity sequences set off. The output of the analysis was viewed by pairwise comparison, and ranked according to the probability score (E-value), where the score reflect the probability that a particular alignment occurs by chance (the lower the E-value, the more significant the hit). In addition to E-values, comparisons were also scored by percentage identity. Percentage identity refers to the number of identical nucleotides (or amino acids) between the two compared nucleic acid (or polypeptide) sequences over a particular length. In some instances, the default parameters may be adjusted to modify the stringency of the search. For example the E-value may be increased to show less stringent matches. This way, short nearly exact matches may be identified.

[0566] Table A2 provides a list of nucleic acid sequences related to the nucleic acid sequence used in the methods of the present invention.

TABLE A2
Examples of MCB nucleic acids and MCB polypeptides:

| | | Nucleic Acid | Polypeptide |
|---|---|---|---|
| Name polypeptide | Group | SEQ ID NO: | SEQ ID NO: |
| T. aestivum_TA69583_4565#1 | MCB1 | 44 | 45 |
| H. vulgare_TA34826_4513#1 | MCB1 | 46 | 47 |
| O. sativa_LOC_Os10g41260.1#1 | MCB1 | 48 | 49 |
| S. bicolor_TA25773_4558#1 | MCB1 | 50 | 51 |
| Z. mays_TA13716_4577999#1 | MCB1 | 52 | 53 |
| Z. mays_TA182110_4577#1 | MCB1 | 54 | 55 |
| O. sativa_LOC_Os08g05510.1#1 | MCB1 | 56 | 57 |
| S. bicolor_5287585#1 | MCB1 | 58 | 59 |
| S. officinarum_TA45655_4547#1 | MCB1 | 60 | 61 |
| Z. mays_TA15909_4577999#1 | MCB1 | 62 | 63 |
| A. formosa_x_pubescens_TA8355_338618#1 | MCB2 | 64 | 65 |
| At3g16350_CCA1-like_NA | MCB2 | 66 | 67 |
| At5g47390_CCA1-like_NA | MCB2 | 68 | 69 |
| B. distachyon_TA656_15368#1 | MCB2 | 70 | 71 |
| B. napus_TA30661_3708#1 | MCB2 | 72 | 73 |
| B. oleracea_TA7433_3712#1 | MCB2 | 74 | 75 |
| B. rapa_TA7102_3711#1 | MCB2 | 76 | 77 |
| C. aurantium_TA1231_43166#1 | MCB2 | 78 | 79 |
| C. canephora_TA11234_49390#1 | MCB2 | 80 | 81 |
| C. clementina_DY291244#1 | MCB2 | 82 | 83 |
| C. clementina_TA3599_85681#1 | MCB2 | 84 | 85 |
| C. intybus_TA5216_13427#1 | MCB2 | 86 | 87 |
| C. sinensis_TA12645_2711#1 | MCB2 | 88 | 89 |
| C. sinensis_TA12698_2711#1 | MCB2 | 90 | 91 |
| C. solstitialis_TA5326_347529#1 | MCB2 | 92 | 93 |
| Citrus_x_paradisi_x_Poncirus_trifoliata_TA3162_309804#1 | MCB2 | 94 | 95 |
| G. hirsutum_DW481791#1 | MCB2 | 96 | 97 |
| G. hirsutum_TA22340_3635#1 | MCB2 | 98 | 99 |
| G. max_Gm0035x00072#1 | MCB2 | 100 | 101 |
| G. max_Gm0088x00239#1 | MCB2 | 102 | 103 |
| G. max_Gm0134x00236#1 | MCB2 | 104 | 105 |
| G. max_Gm0281x00004#1 | MCB2 | 106 | 107 |
| G. raimondii_TA11449_29730#1 | MCB2 | 108 | 109 |
| H. vulgare_TA37070_4513#1 | MCB2 | 110 | 111 |
| H. vulgare_TA41701_4513#1 | MCB2 | 112 | 113 |
| L. sativa_TA11057_4236#1 | MCB2 | 114 | 115 |
| M. crystallinum_TA4132_3544#1 | MCB2 | 116 | 117 |
| M. domestica_TA31230_3750#1 | MCB2 | 118 | 119 |
| M. esculenta_TA5202_3983#1 | MCB2 | 120 | 121 |
| M. polymorpha_TA1779_3197#1 | MCB2 | 122 | 123 |
| M. truncatula_AC149079_14.4#1 | MCB2 | 124 | 125 |
| M. truncatula_TA23604_3880#1 | MCB2 | 126 | 127 |
| N. benthamiana_TA9554_4100#1 | MCB2 | 128 | 129 |
| O. sativa_LOC_Os01g09280.1#1 | MCB2 | 130 | 131 |
| O. sativa_LOC_Os08g04840.1#1 | MCB2 | 132 | 133 |
| O. sativa_LOC_Os10g41200.1#1 | MCB2 | 134 | 135 |
| P. patens_131614#1 | MCB2 | 136 | 137 |
| P. patens_168779#1 | MCB2 | 138 | 139 |
| P. patens_77599#1 | MCB2 | 140 | 141 |
| P. patens_77601#1 | MCB2 | 142 | 143 |
| P. persica_TA4641_3760#1 | MCB2 | 144 | 145 |
| P. sitchensis_DR525612#1 | MCB2 | 146 | 147 |
| P. taeda_TA6316_3352#1 | MCB2 | 148 | 149 |
| P. taeda_TA9759_3352#1 | MCB2 | 150 | 151 |
| P. trichocarpa_scaff_I.1357#1 | MCB2 | 152 | 153 |
| P. trichocarpa_scaff_III.403#1 | MCB2 | 154 | 155 |
| P. trichocarpa_TA15936_3694#1 | MCB2 | 156 | 157 |
| P. vulgaris_TA4327_3885#1 | MCB2 | 158 | 159 |
| R. communis_TA1344_3988#1 | MCB2 | 160 | 161 |
| S. bicolor_5278253#1 | MCB2 | 162 | 163 |
| S. bicolor_5281703#1 | MCB2 | 164 | 165 |
| S. bicolor_5287580#1 | MCB2 | 166 | 167 |
| S. lycopersicum_TA41304_4081#1 | MCB2 | 168 | 169 |
| S. moellendorffii_133546#1 | MCB2 | 170 | 171 |
| S. tuberosum_TA28258_4113#1 | MCB2 | 172 | 173 |
| S. tuberosum_TA28343_4113#1 | MCB2 | 174 | 175 |
| T. aestivum_TA76125_4565#1 | MCB2 | 176 | 177 |
| T. aestivum_TA84921_4565#1 | MCB2 | 178 | 179 |
| V. vinifera_GSVIVT00013475001#1 | MCB2 | 180 | 181 |
| Z. mays_TA177425_4577#1 | MCB2 | 182 | 183 |
| Z. mays_TA180696_4577#1 | MCB2 | 184 | 185 |
| Z. mays_TA199181_4577#1 | MCB2 | 186 | 187 |

[0567] In some instances, related sequences have tentatively been assembled and publicly disclosed by research institutions, such as The Institute for Genomic Research (TIGR; beginning with TA). The Eukaryotic Gene Orthologs (EGO) database may be used to identify such related sequences, either by keyword search or by using the BLAST algorithm with the nucleic acid sequence or polypeptide sequence of interest. On other instances, special nucleic acid sequence databases have been created for particular organisms, such as by the Joint Genome Institute. Further, access to proprietary databases, has allowed the identification of novel nucleic acid and polypeptide sequences.

1.3. Sirtuin 2 or Silent Information Regulator 2 (SRT2) polypeptides

[0568] Sequences (full length cDNA, ESTs or genomic) related to the nucleic acid sequence used in the methods of the present invention were identified amongst those maintained in the Entrez Nucleotides database at the National Center for Biotechnology Information (NCBI) using database sequence search tools, such as the Basic Local Alignment Tool (BLAST) (Altschul et al. (1990) J. Mol. Biol. 215:403-410; and Altschul et al. (1997) Nucleic Acids Res. 25:3389-3402). The program is used to find regions of local similarity between sequences by comparing nucleic acid or polypeptide sequences to sequence databases and by calculating the statistical significance of matches. For example, the polypeptide encoded by the nucleic acid used in the present invention was used for the TBLASTN algorithm, with default settings and the filter to ignore low complexity sequences set off. The output of the analysis was viewed by pairwise comparison, and ranked according to the probability score (E-value), where the score reflect the probability that a particular alignment occurs by chance (the lower the E-value, the more significant the hit). In addition to E-values, comparisons were also scored by percentage identity. Percentage identity refers to the number of identical nucleotides (or amino acids) between the two compared nucleic acid (or polypeptide) sequences over a particular length. In some instances, the default parameters may be adjusted to modify the stringency of the search. For example the E-value may be increased to show less stringent matches. This way, short nearly exact matches may be identified.

[0569] Table A3 provides a list of nucleic acid sequences related to the nucleic acid sequence used in the methods of the present invention.

TABLE A3
Examples of SRT2 nucleic acids and encoded polypeptides thereof:

| | Nucleic acid | Polypeptide |
|---|---|---|
| Name | SEQ ID NO: | SEQ ID NO: |
| Os_SRT2a | 198 | 199 |
| A_thaliana_AT5G09230_1 | 200 | 201 |
| A_thaliana_AT5G09230_4 | 202 | 203 |
| A_thaliana_AT5G55760_1 | 204 | 205 |
| G_max_Gm0004x00111 | 206 | 207 |
| G_max_Gm0065x00389 | 208 | 209 |
| M_truncatula_CR936364_51_4 | 210 | 211 |
| O_sativa_Os04g0271000 | 212 | 213 |
| O_sativa_Os12g0179800 | 214 | 215 |
| P_patens_116322 | 216 | 217 |
| P_patens_148151 | 218 | 219 |
| P_patens_164363 | 220 | 221 |
| P_patens_172495 | 222 | 223 |
| P_patens_86384 | 224 | 225 |
| P_trichocarpa_798160 | 226 | 227 |
| Phatr_SIR2 | 228 | 229 |
| Le_SIR21 | 230 | 231 |

[0570] In some instances, related sequences have tentatively been assembled and publicly disclosed by research institutions, such as The Institute for Genomic Research (TIGR; beginning with TA). The Eukaryotic Gene Orthologs (EGO) database may be used to identify such related sequences, either by keyword search or by using the BLAST algorithm with the nucleic acid sequence or polypeptide sequence of interest. On other instances, special nucleic acid sequence databases have been created for particular organisms, such as by the Joint Genome Institute. Further, access to proprietary databases, has allowed the identification of novel nucleic acid and polypeptide sequences.

### 1.4. YRP2 Polypeptides

[0571] Sequences (full length cDNA, ESTs or genomic) related to SEQ ID NO: 235, SEQ ID NO: 237 and SEQ ID NO: 239 are identified amongst those maintained in the Entrez Nucleotides database at the National Center for Biotechnology Information (NCBI) using database sequence search tools, such as the Basic Local Alignment Tool (BLAST) (Altschul et al. (1990) J. Mol. Biol. 215:403-410; and Altschul et al. (1997) Nucleic Acids Res. 25:3389-3402). The program is used to find regions of local similarity between sequences by comparing nucleic acid or polypeptide sequences to sequence databases and by calculating the statistical significance of matches. For example, the polypeptide encoded by the nucleic acid of SEQ ID NO: 235, SEQ ID NO: 237 and SEQ ID NO: 239 is used in the TBLASTN algorithm, with default settings and the filter to ignore low complexity sequences set off. The output of the analysis was viewed by pairwise comparison, and ranked according to the probability score (E-value), where the score reflects the probability that a particular alignment occurs by chance (the lower the E-value, the more significant the hit). In addition to E-values, comparisons are also scored by percentage identity. Percentage identity refers to the number of identical nucleotides (or amino acids) between the two compared nucleic acid (or polypeptide) sequences over a particular length. In some instances, the default parameters are adjusted to modify the stringency of the search. For example the E-value is increased to show less stringent matches. This way, short nearly exact matches are identified.

[0572] Table A4 provides a list of YRP2 nucleic acid sequences.

TABLE A4
Examples YRP2 polypeptides:

| | | Nucleic acid | Polypeptide |
|---|---|---|---|
| Name | Organism | SEQ ID NO | SEQ ID NO |
| Le_YRP2 | Solanum lycopersicum | 235 | 236 |
| Pp_YRP2 | Physcomitrella patens ssp. | 237 | 238 |
| | patens | | |
| Gm_YRP2 | Glycine max | 239 | 240 |

[0573] In some instances, related sequences are tentatively assembled and publicly disclosed by research institutions, such as The Institute for Genomic Research (TIGR; beginning with TA). The Eukaryotic Gene Orthologs (EGO) database is used to identify such related sequences, either by keyword search or by using the BLAST algorithm with the nucleic acid sequence or polypeptide sequence of interest. In other instances, special nucleic acid sequence databases are created for particular organisms, such as by the Joint Genome Institute.

### 1.5. YRP3 Polypeptides

[0574] Sequences (full length cDNA, ESTs or genomic) related to SEQ ID NO: 244, SEQ ID NO: 246, SEQ ID NO: 248, SEQ ID NO: 250, SEQ ID NO: 252 and SEQ ID NO: 254 are identified amongst those maintained in the Entrez Nucleotides database at the National Center for Biotechnology Information (NCBI) using database sequence search tools, such as the Basic Local Alignment Tool (BLAST) (Altschul et al. (1990) J. Mol. Biol. 215:403-410; and Altschul et al. (1997) Nucleic Acids Res. 25:3389-3402). The program is used to find regions of local similarity between sequences by comparing nucleic acid or polypeptide sequences to sequence databases and by calculating the statistical significance of matches. For example, the polypeptide encoded by the nucleic acid of SEQ ID NO: 244, SEQ ID NO: 246, SEQ ID NO: 248, SEQ ID NO: 250, SEQ ID NO: 252 and SEQ ID NO: 254 is used in the TBLASTN algorithm, with default settings and the filter to ignore low complexity sequences not off. The output of the analysis was viewed by pairwise comparison, and ranked according to the probability score (E-value), where the score reflects the probability that a particular alignment occurs by chance (the lower the E-value, the more significant the hit). In addition to E-values, comparisons are also scored by percentage identity. Percentage identity refers to the number of identical nucleotides (or amino acids) between the two compared nucleic acid (or polypeptide) sequences over a particular length. In some instances, the default parameters are adjusted to modify the stringency of the search. For example the E-value is increased to show less stringent matches. This way, short nearly exact matches are identified.

[0575] Table A5 provides a list of YRP3 nucleic acid sequences.

TABLE A5
Examples YRP3 polypeptides:

| | | Nucleic acid | Polypeptide |
|---|---|---|---|
| Name | Organism | SEQ ID NO | SEQ ID NO |
| Pp_YRP3 | Physcomitrella patens | 244 | 245 |
| | ssp. patens | | |
| Pp_YRP3 short | Physcomitrella patens | 246 | 247 |
| | ssp. patens | | |
| Pt_YRP3 | Populus trichocarpa | 248 | 249 |
| Pt_YRP3 short | Populus trichocarpa | 250 | 251 |
| Os_YRP3 | Oryza sativa | 252 | 253 |
| Os_YRP3 short | Oryza sativa | 254 | 255 |

[0576] In some instances, related sequences are tentatively assembled and publicly disclosed by research institutions, such as The Institute for Genomic Research (TIGR; beginning with TA). The Eukaryotic Gene Orthologs (EGO) database is used to identify such related sequences, either by keyword search or by using the BLAST algorithm with the nucleic acid sequence or polypeptide sequence of interest. In other instances, special nucleic acid sequence databases are created for particular organisms, such as by the Joint Genome Institute.

### 1.6. YRP4 Polypeptides

[0577] Sequences (full length cDNA, ESTs or genomic) related to SEQ ID NO: 261 and SEQ ID NO 263 are identified amongst those maintained in the Entrez Nucleotides database at the National Center for Biotechnology Information (NCBI) using database sequence search tools, such as the Basic Local Alignment Tool (BLAST) (Altschul et al. (1990) J. Mol. Biol. 215:403-410; and Altschul et al. (1997) Nucleic Acids Res. 25:3389-3402). The program is used to find regions of local similarity between sequences by comparing nucleic acid or polypeptide sequences to sequence databases and by calculating the statistical significance of matches. For example, the polypeptide encoded by the nucleic acid of SEQ ID NO: 261 and SEQ ID NO: 263 is used in the TBLASTN algorithm, with default settings and the filter to ignore low complexity sequences set off. The output of the analysis was viewed by pairwise comparison, and ranked according to the probability score (E-value), where the score reflects the probability that a particular alignment occurs by chance (the lower the E-value, the more significant the hit). In addition to E-values, comparisons are also scored by percentage identity. Percentage identity refers to the number of identical nucleotides (or amino acids) between the two compared nucleic acid (or polypeptide) sequences over a particular length. In some instances, the default parameters are adjusted to modify the stringency of the search. For example the E-value is increased to show less stringent matches. This way, short nearly exact matches are identified.

[0578] Table A6 provides a list of YRP4 nucleic acid sequences.

TABLE A6
Examples YRP4 polypeptides:

| | | Nucleic acid | Polypeptide |
|---|---|---|---|
| Name | Organism | SEQ ID NO | SEQ ID NO |
| Ta_YRP4 | Triticum aestivum | 261 | 262 |
| Le_YRP4 | Solanum lycopersicum | 263 | 264 |

[0579] In some instances, related sequences are tentatively assembled and publicly disclosed by research institutions, such as The Institute for Genomic Research (TIGR; beginning with TA). The Eukaryotic Gene Orthologs (EGO) database is used to identify such related sequences, either by keyword search or by using the BLAST algorithm with the nucleic acid sequence or polypeptide sequence of interest. In other instances, special nucleic acid sequence databases are created for particular organisms, such as by the Joint Genome Institute.

### 1.7. SPX-RING (SYG1, Pho81, XPR1-Zinc Finger, RING-Type) Polypeptides

[0580] Sequences (full length cDNA, ESTs or genomic) related to the nucleic acid sequence used in the methods of the present invention were identified amongst those maintained in the Entrez Nucleotides database at the National Center for Biotechnology Information (NCBI) using database sequence search tools, such as the Basic Local Alignment Tool (BLAST) (Altschul et al. (1990) J. Mol. Biol. 215:403-410; and Altschul et al. (1997) Nucleic Acids Res. 25:3389-3402). The program is used to find regions of local similarity between sequences by comparing nucleic acid or polypeptide sequences to sequence databases and by calculating the statistical significance of matches. For example, the polypeptide encoded by the nucleic acid used in the present invention was used for the TBLASTN algorithm, with default settings and the filter to ignore low complexity sequences set off. The output of the analysis was viewed by pairwise comparison, and ranked according to the probability score (E-value), where the score reflect the probability that a particular alignment occurs by chance (the lower the E-value, the more significant the hit). In addition to E-values, comparisons were also scored by percentage identity. Percentage identity refers to the number of identical nucleotides (or amino acids) between the two compared nucleic acid (or polypeptide) sequences over a particular length. In some instances, the default parameters may be adjusted to modify the stringency of the search. For example the E-value may be increased to show less stringent matches. This way, short nearly exact matches may be identified.

[0581] Table A7 provides a list of nucleic acid sequences related to the nucleic acid sequence used in the methods of the present invention.

TABLE A7
Examples of SPX-RING nucleic acids and polypeptides:

| | | Poly- |
|---|---|---|
| | | pep- |
| | Nucleic | tide |
| | acid | SEQ |
| | SEQ | ID |
| Plant Source | ID NO: | NO: |
| 5143_27_992_4530_40_1 | 270 | 271 |
| A_thaliana_AT1G02860_1_1 | 272 | 273 |
| A_thaliana_AT1G02860_2_1 | 274 | 275 |
| A_thaliana_AT2G38920_1_1 | 276 | 277 |
| A_thaliana_AT2G38920_2_1 | 278 | 279 |
| A_thaliana_AT2G38920_3_1 | 280 | 281 |
| C_solstitialis_TA4428_347529_1 | 282 | 283 |
| 6141_27_992_4530_39_1 | 284 | 285 |
| 6142_70_1089_4530_39_1 | 286 | 287 |
| 6143_70_1020_161944_39_1 | 288 | 289 |
| 6144_63_1025_161960_39_1 | 290 | 291 |
| G_max_Gm0041x00193_1 | 292 | 293 |
| G_max_Gm0076x00511_1 | 294 | 295 |
| G_max_TA60390_3847_1 | 296 | 297 |
| H_vulgare_TA44869_4513_1 | 298 | 299 |
| M_truncatula_AC161032_6_5_1 | 300 | 301 |
| O_sativa_LOC_Os03g44810_1_1 | 302 | 303 |
| P_patens_133289_1 | 304 | 305 |
| P_patens_181776_1 | 306 | 307 |
| P_sitchensis_TA12256_3332_1 | 308 | 309 |
| P_taeda_TA11323_3352_1 | 310 | 311 |
| P_taeda_TA15528_3352_1 | 312 | 313 |
| P_taeda_TA9678_3352_1 | 314 | 315 |
| P_tirichocarpa_572701_1 | 316 | 317 |
| P_trichocarpa_576441_1 | 318 | 319 |
| P_trichocarpa_644742_1 | 320 | 321 |
| P_trichocarpa_819318_1 | 322 | 323 |
| P_trichocarpa_scaff_VI_1152_1 | 324 | 325 |
| S_bicolor_5264025_1 | 326 | 327 |
| S_moellendorffii_91888_1 | 328 | 329 |
| S_moellendorffii_93997_1 | 330 | 331 |
| V_vinifera_GSVIVT00027122001_1 | 332 | 333 |
| V_vinifera_GSVIVT00027985001_1 | 334 | 335 |
| Z_mays_ZM07MC03092_59138148_3082_1 | 336 | 337 |
| Z_mays_ZM07MSbpsHQ_57373082_r01_38673_1 | 338 | 339 |

### Example 2

### Alignment of Sequences Related to the Polypeptide Sequences Used in the Methods of the Invention

### 2.1. Cofactor Required for Sp1 Activation (CRSP) Polypeptides

[0582] Alignment of polypeptide sequences was performed using the ClustalW 2.0 algorithm of progressive alignment (Thompson et al. (1997) Nucleic Acids Res 25:4876-4882; Chema et al. (2003). Nucleic Acids Res 31:3497-3500) with standard setting (slow alignment, similarity matrix: Gonnet (or Blosum 62), gap opening penalty 10, gap extension penalty: 0.2). Minor manual editing was done to further optimise the alignment. The CRSP33-like polypeptides are aligned in FIG. 1.

[0583] A phylogenetic tree of CRSP33-like polypeptides (FIG. 2) was constructed using a neighbour-joining clustering algorithm as provided in the AlignX programme from the Vector NTI (Invitrogen).

### 2.2. Myb-Related CAB Promoter-Binding (MCB) Polypeptides

[0584] Alignment of MCB polypeptide sequences of the MCB1 group was performed using the ClustalW 2.0 algorithm of progressive alignment (Thompson et al. (1997) Nucleic Acids 25:4876-4882; Chema et al. (2003). Nucleic Acids Res 31:3497-3500) with standard setting and using the Blosum 62 matrix as provided in the Align software of the VNTI package of Invitrogen. The MCB polypeptides are aligned in FIG. 4.

### 2.3. Sirtuin 2 or Silent Information Regulator 2 (SRT2) Polypeptides

[0585] Alignment of polypeptide sequences was performed using the ClustalW 2.0 algorithm of progressive alignment (Thompson et al. (1997) Nucleic Acids Res 25:4876-4882; Chema et al. (2003). Nucleic Acids Res 31:3497-3500) with standard setting (slow alignment, similarity matrix: Gonnet (or Blosum 62 (if polypeptides are aligned)., gap opening penalty 10, gap extension penalty: 0.2). Minor manual editing was done to further optimise the alignment. The SRT2 polypeptides are aligned in FIG. 6.

[0586] Alignment of polypeptide sequences was performed using the ClustalW 2.0 algorithm of progressive alignment (Thompson et al. (1997) Nucleic Acids Res 25:4876-4882; Chema et al. (2003). Nucleic Acids Res 31:3497-3500) with standard setting (slow alignment, similarity matrix: Gonnet, gap opening penalty 10, gap extension penalty: 0.2). Minor manual editing was done to further optimise the alignment.

### 2.4. YRP2 Polypeptides

[0587] Alignment of polypeptide sequences is performed using the ClustalW 2.0 algorithm of progressive alignment (Thompson et al. (1997) Nucleic Acids Res 25:4876-4882; Chema et al. (2003). Nucleic Acids Res 31:3497-3500) with standard setting (slow alignment, similarity matrix: Gonnet (or Blosum 62 (if polypeptides are aligned), gap opening penalty 10, gap extension penalty: 0.2). Minor manual editing is done to further optimise the alignment.

[0588] A phylogenetic tree of YRP2 polypeptides is constructed using a neighbour-joining clustering algorithm as provided in the AlignX programme from the Vector NTI (Invitrogen).

### 2.5. YRP3 Polypeptides

[0589] Alignment of polypeptide sequences is performed using the ClustalW 2.0 algorithm of progressive alignment (Thompson et al. (1997) Nucleic Acids Res 25:4876-4882; Chema et al. (2003). Nucleic Acids Res 31:3497-3500) with standard setting (slow alignment, similarity matrix: Gonnet (or Blosum 62 (if polypeptides are aligned), gap opening penalty 10, gap extension penalty: 0.2). Minor manual editing is done to further optimise the alignment.

[0590] A phylogenetic tree of YRP3 polypeptides is constructed using a neighbour-joining clustering algorithm as provided in the AlignX programme from the Vector NTI (Invitrogen).

### 2.6. YRP4 Polypeptides

[0591] Alignment of polypeptide sequences is performed using the ClustalW 2.0 algorithm of progressive alignment (Thompson et al. (1997) Nucleic Acids Res 25:4876-4882; Chema et al. (2003). Nucleic Acids Res 31:3497-3500) with standard setting (slow alignment, similarity matrix: Gonnet (or Blosum 62 (if polypeptides are aligned), gap opening penalty 10, gap extension penalty: 0.2). Minor manual editing is done to further optimise the alignment.

[0592] A phylogenetic tree of YRP4 polypeptides is constructed using a neighbour-joining clustering algorithm as provided in the AlignX programme from the Vector NTI (Invitrogen).

### 2.7. SPX-RING (SYG1, Pho81, XPR1-Zinc Finger, RING-Type) Polypeptides

[0593] Alignment of polypeptide sequences was performed using AlignX programme from the Vector NTI (Invitrogen) which is based on the Clustal W 2.0 algorithm of progressive alignment (Thompson et al. (1997) Nucleic Acids Res 25:4876-4882; Chema et al. (2003). Nucleic Acids Res 31:3497-3500) with standard setting: gap opening penalty 10, gap extension penalty: 0.2. The SPX-RING polypeptides are aligned in FIG. 11.

### Example 3

### Calculation of Global Percentage Identity Between Polypeptide Sequences Useful in Performing the Methods of the Invention

### 3.1. Cofactor Required for Sp1 Activation (CRSP) Polypeptides

[0594] Global percentages of similarity and identity between full length CRSP33-like polypeptide sequences is determined using the MatGAT (Matrix Global Alignment Tool) software (BMC Bioinformatics. 2003 4:29. MatGAT: an application that generates similarity/identity matrices using protein or DNA sequences. Campanella JJ, Bitincka L, Smalley J; software hosted by Ledion Bitincka). MatGAT software generates similarity/identity matrices for DNA or protein sequences without needing pre-alignment of the data. The program performs a series of pair-wise alignments using the Myers and Miller global alignment algorithm (with a gap opening penalty of 12, and a gap extension penalty of 2), calculates similarity and identity using for example Blosum 62 (for polypeptides), and then places the results in a distance matrix.

[0595] Parameters used for the comparison are:
[0596] Scoring matrix: Blosum62
[0597] First Gap: 12
[0598] Extending gap: 2

[0599] A MATGAT table for local alignment on a domain level is also performed.

### 3.2. Myb-Related CAB Promoter-Binding (MCB) Polypeptides

[0600] Global percentages of similarity and identity between full length polypeptide sequences useful in performing the methods of the invention were determined using one of the methods available in the art, the MatGAT (Matrix Global Alignment Tool) software (BMC Bioinformatics. 2003 4:29. MatGAT: an application that generates similarity/identity matrices using protein or DNA sequences. Campanella J J, Bitincka L, Smalley J; software hosted by Ledion Bitincka). MatGAT software generates similarity/identity matrices for DNA or protein sequences without needing pre-alignment of the data. The program performs a series of pair-wise alignments using the Myers and Miller global alignment algorithm (with a gap opening penalty of 12, and a gap extension penalty of 2), calculates similarity and identity using for example Blosum 62 (for polypeptides), and then places the results in a distance matrix. Sequence identity is shown in the top half of the diagonal dividing line.

[0601] Parameters used in the comparison were:
[0602] Scoring matrix: Blosum62
[0603] First Gap: 12
[0604] Extending gap: 2

[0605] Results of the software analysis are shown in Table B1 for the global similarity and identity over the full length of the polypeptide sequences.

[0606] The percentage identity between the MCB polypeptide sequences useful in performing the methods of the invention can be as low as 34% amino acid identity compared to SEQ ID NO: 45.

TABLE B1
MatGAT results for global similarity and identity over the full length of the polypeptide sequences.

| | 1 | 2 | 3 | 4 | 5 | 6 | 7 | 8 | 9 | 10 |
|---|---|---|---|---|---|---|---|---|---|---|
| 1. H.vulgare_TA34826_4513* | | 63.6 | 59.2 | 88.6 | 48.9 | 58.5 | 34.3 | 34.2 | 37 | 34.2 |
| 2. O.sativa_LOC_Os10g41260.1* | | | 61.2 | 62.8 | 50.7 | 57.8 | 33 | 32.4 | 37.1 | 31.9 |
| 3. S.bicolor_TA25773_4558* | | | | 60.2 | 55.8 | 76.4 | 31.9 | 31.3 | 34.9 | 30.3 |
| 4. T.aestivum_TA69583_4565* | | | | | 48.2 | 59.8 | 34 | 34.6 | 36.9 | 33.6 |
| 5. Z.mays_TA13716_4577999* | | | | | | 72.2 | 28.5 | 29.1 | 36.8 | 28.7 |
| 6. Z.mays_TA182110_4577* | | | | | | | 32.1 | 32.2 | 33 | 31.5 |
| 7. O.sativa_LOC_Os08g05510.1* | | | | | | | | 71.7 | 51.3 | 67.3 |
| 8. S.bicolor_5287585* | | | | | | | | | 63.3 | 89.1 |
| 9. S.officinarum_TA45655_4547* | | | | | | | | | | 59.2 |
| 10. Z.mays_TA15909_4577999* | | | | | | | | | | |

[0607] Table B2: MatGAT results for global identity over the full length of the polypeptide sequences of motif 1 as present in the polypeptides 1 to 10 of the table below.

TABLE B2
Matgat Motif 1

| Name polypeptide comprising Motif 1 | 1 | 2 | 3 | 4 | 5 | 6 | 7 | 8 | 9 | 10 |
|---|---|---|---|---|---|---|---|---|---|---|
| 1. T.aestivum_TA69583_4565_MCB1-1 | | 100 | 90 | 88 | 88 | 88 | 94 | 94 | 94 | 92 |
| 2. H.vulgare_TA34826_4513_MCB1-1 | | | 90 | 88 | 88 | 88 | 94 | 94 | 94 | 92 |
| 3. O.sativa_LOC_Os08g05510._MCB1-1 | | | | 98 | 98 | 98 | 88 | 88 | 86 | 86 |
| 4. Z.mays_TA15909_4577999_MCB1-1 | | | | | 100 | 100 | 86 | 86 | 84 | 84 |
| 5. S.officinarum_TA45655_45_MCB1-1 | | | | | | 100 | 86 | 86 | 84 | 84 |
| 6. S.bicolor_5287585_MCB1-1 | | | | | | | 86 | 86 | 84 | 84 |
| 7. Z.mays_TA182110_4577_MCB1-1 | | | | | | | | 100 | 92 | 94 |
| 8. Z.mays_TA13716_4577999_MCB1-1 | | | | | | | | | 92 | 94 |
| 9. O.sativa_LOC_Os10g41260._MCB1-1 | | | | | | | | | | 94 |
| 10. S.bicolor_TA25773_4558_MCB1-1 | | | | | | | | | | |

### 3.3. Sirtuin 2 or Silent Information Regulator 2 (SRT2) Polypeptides

[0608] Global percentages of similarity and identity between full length polypeptide sequences useful in performing the methods of the invention were determined using one of the methods available in the art, the MatGAT (Matrix Global Alignment Tool) software (BMC Bioinformatics. 2003 4:29. MatGAT: an application that generates similarity/identity matrices using protein or DNA sequences. Campanella J J, Bitincka L, Smalley J; software hosted by Ledion Bitincka). MatGAT software generates similarity/identity matrices for DNA or protein sequences without needing pre-alignment of the data. The program performs a series of pair-wise alignments using the Myers and Miller global alignment algorithm (with a gap opening penalty of 12, and a gap extension penalty of 2), calculates similarity and identity using for example Blosum 62 (for polypeptides), and then places the results in a distance matrix. Sequence similarity is shown in the bottom half of the dividing line and sequence identity is shown in the top half of the diagonal dividing line.

[0609] Parameters used in the comparison were:
[0610] Scoring matrix: Blosum62
[0611] First Gap: 12
[0612] Extending gap: 2

[0613] Results of the software analysis are shown in Table B3 for the global similarity and identity over the full length of the polypeptide sequences. Percentage identity is given above the diagonal in bold and percentage similarity is given below the diagonal (normal face).

[0614] The percentage identity between the SRT2 polypeptide sequences useful in performing the methods of the invention can be as low as 17.8% amino acid identity compared to SEQ ID NO: 199 (Os_SRT2a).

TABLE B3
MatGAT results for global similarity and identity over the full length of the polypeptide sequences

| | 1 | 2 | 3 | 4 | 5 | 6 | 7 | 8 | 9 | 10 | 11 | 12 | 13 | 14 | 15 |
|---|---|---|---|---|---|---|---|---|---|---|---|---|---|---|---|
| 1. Os_SRT2a | | 56.7 | 45.7 | 18.7 | 19.3 | 57.4 | 59.3 | 17.8 | 99.5 | 51.5 | 19.3 | 24.8 | 21.3 | 18.9 | 19.0 |
| 2. A_thaliana_AT5G09230_1 | 71.8 | | 67.0 | 19.3 | 18.2 | 67.9 | 68.4 | 20.9 | 57.0 | 52.1 | 21.6 | 20.6 | 23.1 | 18.7 | 18.0 |
| 3. A_thaliana_AT5G09230_4 | 54.7 | 69.2 | | 18.0 | 15.6 | 51.7 | 53.2 | 20.2 | 45.7 | 42.8 | 19.6 | 20.0 | 19.4 | 21.0 | 17.0 |
| 4. A_thaliana_AT5G55760_1 | 35.3 | 34.9 | 28.3 | | 53.4 | 18.3 | 19.7 | 57.5 | 18.9 | 19.9 | 46.8 | 19.6 | 21.9 | 15.6 | 69.5 |
| 5. G_max_Gm0004x00111 | 33.9 | 32.7 | 25.7 | 67.8 | | 19.7 | 19.3 | 46.0 | 19.5 | 18.8 | 37.7 | 18.6 | 24.7 | 13.4 | 56.9 |
| 6. G_max_Gm0065x00389 | 73.3 | 81.2 | 61.3 | 36.8 | 32.0 | | 78.1 | 18.6 | 57.7 | 51.3 | 19.2 | 21.8 | 22.7 | 19.2 | 18.6 |
| 7. M_truncatula_CR936364 | 73.8 | 84.4 | 63.0 | 36.4 | 31.5 | 88.8 | | 18.4 | 59.5 | 53.5 | 21.7 | 22.8 | 23.2 | 19.6 | 18.7 |
| 8. O_sativa_Os04g0271000 | 36.4 | 36.2 | 30.2 | 74.3 | 62.1 | 35.2 | 34.6 | | 17.8 | 21.7 | 45.3 | 20.4 | 23.5 | 16.1 | 58.7 |
| 9. O_sativa_Os12g0179800 | 99.5 | 72.0 | 54.7 | 36.2 | 34.1 | 73.5 | 73.8 | 35.8 | | 52.0 | 20.1 | 25.0 | 21.5 | 19.1 | 19.1 |
| 10. P_patens_116322 | 66.7 | 70.2 | 57.8 | 34.7 | 31.3 | 69.2 | 70.1 | 35.0 | 67.2 | | 22.0 | 24.8 | 23.3 | 20.5 | 21.5 |
| 11. P_patens_148151 | 38.7 | 40.6 | 32.3 | 61.5 | 49.7 | 37.9 | 39.3 | 60.7 | 39.9 | 41.1 | | 22.2 | 27.1 | 19.7 | 48.6 |
| 12. P_patens_164363 | 42.7 | 41.0 | 39.6 | 35.9 | 29.5 | 40.5 | 39.9 | 35.4 | 42.7 | 40.8 | 38.3 | | 21.5 | 22.9 | 20.2 |
| 13. P_patens_172495 | 38.2 | 37.7 | 29.8 | 43.6 | 42.3 | 39.1 | 37.7 | 42.4 | 38.4 | 38.2 | 44.2 | 32.7 | | 17.4 | 24.1 |
| 14. P_patens_86384 | 31.6 | 29.8 | 38.0 | 26.2 | 22.6 | 30.0 | 32.0 | 26.1 | 31.8 | 34.2 | 33.1 | 35.3 | 27.4 | | 14.6 |
| 15. P_trichocarpa_798160 | 34.3 | 34.9 | 28.0 | 85.6 | 68.4 | 35.6 | 33.2 | 74.3 | 34.5 | 35.8 | 62.9 | 33.8 | 45.7 | 26.1 | |

### 3.4. YRP2 Polypeptides

[0615] Global percentages of similarity and identity between full length polypeptide sequences is determined using one of the methods available in the art, the MatGAT (Matrix Global Alignment Tool) software (BMC Bioinformatics. 2003 4:29. MatGAT: an application that generates similarity/identity matrices using protein or DNA sequences. Campanella J J, Bitincka L, Smalley J; software hosted by Ledion Bitincka). MatGAT software generates similarity/identity matrices for DNA or protein sequences without needing pre-alignment of the data. The program performs a series of pair-wise alignments using the Myers and Miller global alignment algorithm (with a gap opening penalty of 12, and a gap extension penalty of 2), calculates similarity and identity using for example Blosum 62 (for polypeptides), and then places the results in a distance matrix. Sequence similarity is shown in the bottom half of the dividing line and sequence identity is shown in the top half of the diagonal dividing line.

[0616] Parameters used in the comparison are:
[0617] Scoring matrix: Blosum62
[0618] First Gap: 12
[0619] Extending gap: 2

[0620] A MATGAT table for local alignment of a specific domain, or data on % identity/similarity between specific domains may also be performed.

### 3.5. YRP3 Polypeptides

[0621] Global percentages of similarity and identity between full length polypeptide sequences is determined using one of the methods available in the art, the MatGAT (Matrix Global Alignment Tool) software (BMC Bioinformatics. 2003 4:29. MatGAT: an application that generates similarity/identity matrices using protein or DNA sequences. Campanella J J, Bitincka L, Smalley J; software hosted by Ledion Bitincka). MatGAT software generates similarity/identity matrices for DNA or protein sequences without needing pre-alignment of the data. The program performs a series of pair-wise alignments using the Myers and Miller global alignment algorithm (with a gap opening penalty of 12, and a gap extension penalty of 2), calculates similarity and identity using for example Blosum 62 (for polypeptides), and then places the results in a distance matrix. Sequence similarity is shown in the bottom half of the dividing line and sequence identity is shown in the top half of the diagonal dividing line.

[0622] Parameters used in the comparison are:
[0623] Scoring matrix: Blosum62
[0624] First Gap: 12
[0625] Extending gap: 2

[0626] A MATGAT table for local alignment of a specific domain, or data on % identity/similarity between specific domains may also be performed.

### 3.6. YRP4 Polypeptides

[0627] Global percentages of similarity and identity between full length polypeptide sequences is determined using one of the methods available in the art, the MatGAT (Matrix Global Alignment Tool) software (BMC Bioinformatics. 2003 4:29. MatGAT: an application that generates similarity/identity matrices using protein or DNA sequences. Campanella JJ, Bitincka L, Smalley J; software hosted by Ledion Bitincka). MatGAT software generates similarity/identity matrices for DNA or protein sequences without needing pre-alignment of the data. The program performs a series of pair-wise alignments using the Myers and Miller global alignment algorithm (with a gap opening penalty of 12, and a gap extension penalty of 2), calculates similarity and identity using for example Blosum 62 (for polypeptides), and then places the results in a distance matrix. Sequence similarity is shown in the bottom half of the dividing line and sequence identity is shown in the top half of the diagonal dividing line.

[0628] Parameters used in the comparison are:
[0629] Scoring matrix: Blosum62
[0630] First Gap: 12
[0631] Extending gap: 2

[0632] A MATGAT table for local alignment of a specific domain, or data on % identity/similarity between specific domains may also be performed.

### 3.7. SPX-RING (SYG1, Pho81, XPR1-Zinc Finger, RING-Type) Polypeptides

[0633] Global percentages of similarity and identity between full length polypeptide sequences useful in performing the methods of the invention were determined using one of the methods available in the art, the MatGAT (Matrix Global Alignment Tool) software (BMC Bioinformatics. 2003 4:29. MatGAT: an application that generates similarity/identity matrices using protein or DNA sequences. Campanella J J, Bitincka L, Smalley J; software hosted by Ledion Bitincka). MatGAT software generates similarity/identity matrices for DNA or protein sequences without needing pre-alignment of the data. The program performs a series of pair-wise alignments using the Myers and Miller global alignment algorithm (with a gap opening penalty of 12, and a gap extension penalty of 2), calculates similarity and identity using for example Blosum 62 (for polypeptides), and then places the results in a distance matrix. Sequence similarity is shown in the bottom half of the dividing line and sequence identity is shown in the top half of the diagonal dividing line.

[0634] Parameters used in the comparison were:
[0635] Scoring matrix: Blosum62
[0636] First Gap: 12
[0637] Extending gap: 2

[0638] Results of the software analysis are shown in Table; B4 for the global similarity and identity over the full length of the polypeptide sequences. Percentage identity is given above the diagonal in bold and percentage similarity is given below the diagonal (normal face).

[0639] The percentage identity between the SPX-RING polypeptide sequences useful in performing the methods of the invention can be as low as 41.3% amino acid identity compared to SEQ ID NO: 271 (5143_{—}27_{—}992_{—}4530_{—}40_{—}1).

TABLE B4
MatGAT results for global similarity and identity over the full length of the polypeptide sequences.

| Name | 1 | 2 | 3 | 4 | 5 | 6 | 7 | 8 | 9 | 10 | 11 | 12 | 13 | 14 | 15 |
|---|---|---|---|---|---|---|---|---|---|---|---|---|---|---|---|
| 6142_70_1089_4530_39_1 | | 44.2 | 44.2 | 43.7 | 43.4 | 43.1 | 43.2 | 41.8 | 44.0 | 39.9 | 41.2 | 41.4 | 41.6 | 41.3 | 78.1 |
| M_truncatula_AC161032_6_5 | 62.2 | | 100 | 74.1 | 74.5 | 78.8 | 78.8 | 72.9 | 77.5 | 59.2 | 65.4 | 64.8 | 63.8 | 63.5 | 41.6 |
| 6143_70_1020_161944_39_1 | 62.2 | 100 | | 74.1 | 74.5 | 78.8 | 78.8 | 72.9 | 77.5 | 59.2 | 65.4 | 64.8 | 63.8 | 63.5 | 41.6 |
| 6144_63_1025_161960_39_1 | 63.7 | 86.6 | 86.6 | | 99.7 | 79.3 | 79.0 | 89.7 | 82.4 | 64.5 | 68.1 | 67.8 | 70.0 | 69.7 | 40.0 |
| P_trichocarpa_572701_1 | 63.4 | 86.9 | 86.9 | 99.7 | | 79.6 | 79.3 | 90.0 | 82.7 | 64.8 | 68.4 | 68.1 | 70.3 | 70.0 | 40.0 |
| G_max_Gm0076x00511_1 | 61.9 | 88.0 | 88.0 | 90.1 | 90.4 | | 97.5 | 77.5 | 83.3 | 62.5 | 68.1 | 67.5 | 67.6 | 67.3 | 40.0 |
| G_max_TA60390_3847_1 | 62.5 | 87.3 | 87.3 | 89.5 | 89.8 | 99.1 | | 77.5 | 83.0 | 63.7 | 67.8 | 67.2 | 66.7 | 66.4 | 40.3 |
| P_trichocarpa_644742_1 | 64.0 | 84.4 | 84.4 | 95.9 | 96.3 | 88.3 | 88.0 | | 81.8 | 63.1 | 66.6 | 66.0 | 70.3 | 70.0 | 38.1 |
| V_vinifera | 63.4 | 86.7 | 86.7 | 92.0 | 92.3 | 91.0 | 89.8 | 90.4 | | 65.9 | 69.0 | 68.5 | 68.8 | 68.5 | 42.2 |
| GSVIVT00027985001_1 | | | | | | | | | | | | | | | |
| C_solstitialis_TA4428_347529 | 61.7 | 72.4 | 72.4 | 77.2 | 77.5 | 77.2 | 76.6 | 75.2 | 78.3 | | 58.3 | 57.8 | 56.5 | 56.2 | 36.5 |
| A_thaliana_AT1G02860_1_1 | 62.5 | 78.5 | 78.5 | 80.0 | 80.3 | 80.3 | 79.7 | 79.1 | 81.2 | 74.1 | | 99.4 | 60.9 | 60.6 | 38.4 |
| A_thaliana_AT1G02860_2_1 | 62.5 | 78.4 | 78.4 | 80.2 | 80.5 | 80.2 | 79.6 | 79.0 | 81.1 | 73.5 | 99.4 | | 60.3 | 60.0 | 38.8 |
| 6141_27_992_4530_39_1 | 63.7 | 81.9 | 81.9 | 87.2 | 87.5 | 84.3 | 83.3 | 86.9 | 85.2 | 74.1 | 74.3 | 74.2 | | 99.7 | 38.6 |
| 5143_27_992_4530_40_1 | 63.4 | 81.6 | 81.6 | 86.9 | 87.2 | 84.0 | 83.0 | 86.6 | 84.9 | 73.8 | 74.0 | 73.9 | 99.7 | | 38.3 |
| Z_mays_ZM07MC03092 | 84.7 | 57.8 | 57.8 | 59.2 | 59.2 | 58.1 | 58.4 | 58.9 | 61.4 | 59.2 | 57.8 | 57.5 | 58.1 | 57.8 | |
| 59138148_3082_1 | | | | | | | | | | | | | | | |

### Example 4

### Identification of Domains Comprised in Polypeptide Sequences Useful in Performing the Methods of the Invention

### 4.1. Cofactor Required for Sp1 Activation (CRSP) Polypeptides

[0640] The Integrated Resource of Protein Families, Domains and Sites (InterPro) database is an integrated interface for the commonly used signature databases for text- and sequence-based searches. The InterPro database combines these databases, which use different methodologies and varying degrees of biological information about well-characterized proteins to derive protein signatures. Collaborating databases include SWISS-PROT, PROSITE, TrEMBL, PRINTS, Propom and Pfam, Smart and TIGRFAMs. Pfam is a large collection of multiple sequence alignments and hidden Markov models covering many common protein domains and families. Pfam is hosted at the Sanger Institute server in the United Kingdom. Interpro is hosted at the European Bioinformatics Institute in the United Kingdom.

### 4.2. Myb-Related CAB Promoter-Binding (MCB) Polypeptides

[0641] The Integrated Resource of Protein Families, Domains and Sites (InterPro) database is an integrated interface for the commonly used signature databases for text- and sequence-based searches. The InterPro database combines these databases, which use different methodologies and varying degrees of biological information about well-characterized proteins to derive protein signatures. Collaborating databases include SWISS-PROT, PROSITE, TrEMBL, PRINTS, Propom and Pfam, Smart and TIGRFAMs. Pfam is a large collection of multiple sequence alignments and hidden Markov models covering many common protein domains and families. Pfam is hosted at the Sanger Institute server in the United Kingdom. Interpro is hosted at the European Bioinformatics Institute in the United Kingdom.

[0642] The results of the InterPro scan of the polypeptide sequence as represented by SEQ ID NO: 45 are presented in Table C1.

TABLE C1
InterPro scan results (major accession numbers) of the
polypeptide sequence as represented by SEQ ID NO: 45.

| | | | | amino acid |
|---|---|---|---|---|
| Database | AccNumber | Short Name | evalue | coordinates |
| IPR001005 | SANT, DNA-binding | DNA-binding | | |
| SMART | SM00717 | SANT | 2.7e−11 | [87-137]T |
| IPR006447 | Myb-like DNA- | | | |
| | binding region, | | | |
| | SHAQKYF class | | | |
| TIGRFAMs | TIGR01557 | myb_SHAQKYF: | 2.6e−25 | [86-138]T |
| | | Myb-like DNA-binding S | | |
| IPR009057 | Homeodomain-like | | | |
| SUPERFAMILY | SSF46689 | Homeodomain-like | 6.6e−17 | [82-142]T |
| IPR014778 | Myb, | DNA-binding | | |
| PFAM | PF00249 | Myb_DNA-binding | 1e−12 | [88-135]T |

### 4.3. Sirtuin 2 or Silent Information Regulator 2 (SRT2) Polypeptides

[0643] The Integrated Resource of Protein Families, Domains and Sites (InterPro) database is an integrated interface for the commonly used signature databases for text- and sequence-based searches. The InterPro database combines these databases, which use different methodologies and varying degrees of biological information about well-characterized proteins to derive protein signatures. Collaborating databases include SWISS-PROT, PROSITE, TrEMBL, PRINTS, Propom and Pfam, Smart and TIGRFAMs. Pfam is a large collection of multiple sequence alignments and hidden Markov models covering many common protein domains and families. Pfam is hosted at the Sanger Institute server in the United Kingdom. Interpro is hosted at the European Bioinformatics Institute in the United Kingdom.

[0644] The results of the InterPro scan of the polypeptide sequence as represented by SEQ ID NO: 199 are presented in Table C2.

TABLE C2
Sirt 2 domains as revealed upon performing an InterPro scan of the polypeptide sequence
as represented by SEQ ID NO: 199 (OS_SRT2a) and the homologous proteins of Table A3.

| | | | Amino | Amino | | | |
|---|---|---|---|---|---|---|---|
| | Interpor | Pfam | acid | acid | | | |
| | Accession | accession | position, | position, | | short | Evalue |
| QuerySequence | number | number | From | To | Domain name | name | (score) |
| OS_SRT2a | IPR003000 | PF02146 | 120 | 331 | NAD-dependent histone | SIR2 | 4.00E−48 |
| | | | | | deacetylase, silent | | |
| | | | | | information | | |
| | | | | | regulator Sir2 | | |
| A_thaliana_{—} | IPR003000 | PF02146 | 100 | 318 | NAD-dependent histone | SIR2 | 2.00E−23 |
| AT5G09230_1 | | | | | deacetylase, silent | | |
| | | | | | information | | |
| | | | | | regulator Sir2 | | |
| A_thaliana_{—} | IPR003000 | PF02146 | 53 | 212 | NAD-dependent histone | SIR2 | 2.00E−12 |
| AT5G09230_4 | | | | | deacetylase, silent | | |
| | | | | | information | | |
| | | | | | regulator Sir2 | | |
| A_thaliana_{—} | IPR003000 | PF02146 | 52 | 216 | NAD-dependent histone | SIR2 | 4.30E−12 |
| AT5G55760_1 | | | | | deacetylase, silent | | |
| | | | | | information | | |
| | | | | | regulator Sir2 | | |
| G_max_Gm | IPR003000 | PF02146 | 163 | 327 | NAD-dependent histone | SIR2 | 1.1E−28 |
| 0004x00111 | | | | | deacetylase, silent | | |
| | | | | | information | | |
| | | | | | regulator Sir2 | | |
| G_max_Gm | IPR003000 | PF02146 | 120 | 338 | NAD-dependent histone | SIR2 | 1.1E−43 |
| 0065x00389 | | | | | deacetylase, silent | | |
| | | | | | information | | |
| | | | | | regulator Sir2 | | |
| M_truncatula_{—} | IPR003000 | PF02146 | 105 | 318 | NAD-dependent histone | SIR2 | 2.2E−40 |
| CR936364 | | | | | deacetylase, silent | | |
| | | | | | information | | |
| | | | | | regulator Sir2 | | |
| O_sativa_{—} | IPR003000 | PF02146 | 52 | 216 | NAD-dependent histone | SIR2 | 3.20E−05 |
| Os04g0271000 | | | | | deacetylase, silent | | |
| | | | | | information | | |
| | | | | | regulator Sir2 | | |
| O_sativa_{—} | IPR003000 | PF02146 | 119 | 331 | NAD-dependent histone | SIR2 | 4.20E−34 |
| Os12g0179800 | | | | | deacetylase, silent | | |
| | | | | | information | | |
| | | | | | regulator Sir2 | | |
| P_patens_{—} | IPR003000 | PF02146 | 86 | 305 | NAD-dependent histone | SIR2 | 3.8E−31 |
| 116322 | | | | | deacetylase, silent | | |
| | | | | | information | | |
| | | | | | regulator Sir2 | | |
| P_patens_{—} | IPR003000 | PF02146 | 53 | 218 | NAD-dependent histone | SIR2 | 8.6E−17 |
| 148151 | | | | | deacetylase, silent | | |
| | | | | | information | | |
| | | | | | regulator Sir2 | | |
| P_patens_{—} | IPR003000 | PF02146 | 55 | 250 | NAD-dependent histone | SIR2 | 7.7E−61 |
| 164363 | | | | | deacetylase, silent | | |
| | | | | | information | | |
| | | | | | regulator Sir2 | | |
| P_patens_{—} | IPR003000 | PF02146 | 154 | 352 | NAD-dependent histone | SIR2 | 1.1E−22 |
| 172495 | | | | | deacetylase, silent | | |
| | | | | | information | | |
| | | | | | regulator Sir2 | | |
| P_patens_{—} | IPR003000 | PF02146 | 16 | 173 | NAD-dependent histone | SIR2 | 1.4E−18 |
| 86384 | | | | | deacetylase, silent | | |
| | | | | | information | | |
| | | | | | regulator Sir2 | | |
| P_trichocarpa_{—} | IPR003000 | PF02146 | 52 | 216 | NAD-dependent histone | SIR2 | 7.4E−23 |
| 798160 | | | | | deacetylase, silent | | |
| | | | | | information | | |
| | | | | | regulator Sir2 | | |

### 4.4. YRP2 Polypeptides

[0645] The Integrated Resource of Protein Families, Domains and Sites (InterPro) database is an integrated interface for the commonly used signature databases for text- and sequence-based searches. The InterPro database combines these databases, which use different methodologies and varying degrees of biological information about well-characterized proteins to derive protein signatures. Collaborating databases include SWISS-PROT, PROSITE, TrEMBL, PRINTS, Propom and Pfam, Smart and TIGRFAMs. Pfam is a large collection of multiple sequence alignments and hidden Markov models covering many common protein domains and families. Pfam is hosted at the Sanger Institute server in the United Kingdom. Interpro is hosted at the European Bioinformatics Institute in the United Kingdom.

### 4.5. YRP3 Polypeptides

[0646] The Integrated Resource of Protein Families, Domains and Sites (InterPro) database is an integrated interface for the commonly used signature databases for text- and sequence-based searches. The InterPro database combines these databases, which use different methodologies and varying degrees of biological information about well-characterized proteins to derive protein signatures. Collaborating databases include SWISS-PROT, PROSITE, TrEMBL, PRINTS, Propom and Pfam, Smart and TIGRFAMs. Pfam is a large collection of multiple sequence alignments and hidden Markov models covering many common protein domains and families. Pfam is hosted at the Sanger Institute server in the United Kingdom. Interpro is hosted at the European Bioinformatics Institute in the United Kingdom.

### 4.6. YRP4 Polypeptides

[0647] The Integrated Resource of Protein Families, Domains and Sites (InterPro) database is an integrated interface for the commonly used signature databases for text- and sequence-based searches. The InterPro database combines these databases, which use different methodologies and varying degrees of biological information about well-characterized proteins to derive protein signatures. Collaborating databases include SWISS-PROT, PROSITE, TrEMBL, PRINTS, Propom and Pfam, Smart and TIGRFAMs. Pfam is a large collection of multiple sequence alignments and hidden Markov models covering many common protein domains and families. Pfam is hosted at the Sanger Institute server in the United Kingdom. Interpro is hosted at the European Bioinformatics Institute in the United Kingdom.

### 4.7. SPX-RING (SYG1, Pho81, XPR1-Zinc Finger, RING-Type) Polypeptides

[0648] The Integrated Resource of Protein Families, Domains and Sites (InterPro) database is an integrated interface for the commonly used signature databases for text- and sequence-based searches. The InterPro database combines these databases, which use different methodologies and varying degrees of biological information about well-characterized proteins to derive protein signatures. Collaborating databases include SWISS-PROT, PROSITE, TrEMBL, PRINTS, Propom and Pfam, Smart and TIGRFAMs. Pfam is a large collection of multiple sequence alignments and hidden Markov models covering many common protein domains and families. Pfam is hosted at the Sanger Institute server in the United Kingdom. Interpro is hosted at the European Bioinformatics Institute in the United Kingdom.

[0649] The results of the InterPro scan of the polypeptide sequence as represented by SEQ ID NO: 271 are presented in Table C3

TABLE C3
InterPro scan results (major accession numbers) of the
polypeptide sequence as represented by SEQ ID NO: 271.

| Pfam | | Amino acid | Amino acid | | Interpro | |
|---|---|---|---|---|---|---|
| accession | Name in | coordinates- | coordinates- | | accession | |
| number | Pfam | start | end | E-value | number | Name in Interpro |
| PF03105 | SPX | 1 | 152 | 2e−12 | IPR004331 | SPX, N terminal |
| PF00097 | Zf-C3HC4 | 217 | 265 | 0.002 | IPR001841 | Zinc, finer, |
| | | | | | | RING type |

### Example 5

### Motif-Based Sequence Analysis

[0650] A number of conserved motifs in SPX-RING polypeptides of Table A7 were discovered using the MEME algorithm; Version 4.0.0 (Timothy L. Bailey and Charles Elkan, Proceedings of the Second International Conference on Intelligent Systems for Molecular Biology, pp. 28-36, AAAI Press, Menlo Park, Calif., 1994). Table D1 shows highly conserved sequence motifs in the SPX-RING polypeptides of Table A7.

| motif | Name of the SPX-RING polypeptide | SEQ ID NO |
|---|---|---|
| motif 1-1 | 5143_27_992_4530_40_1 | 340 |
| motif 1-2 | A_thaliana_AT1G02860_1_1 | 341 |
| motif 1-3 | A_thaliana_AT1G02860_2_1 | 342 |
| motif 1-4 | A_thaliana_AT2G38920_1_1 | 343 |
| motif 1-5 | A_thaliana_AT2G38920_2_1 | 344 |
| motif 1-6 | A_thaliana_AT2G38920_3_1 | 345 |
| motif 1-7 | C_solstitialis_TA4428_34 | 346 |
| motif 1-8 | 6141_27_992_4530_39_1 | 347 |
| motif 1-9 | 6142_70_1089_4530_39_{—} | 348 |
| motif 1-10 | 6143_70_1020_161944_3 | 349 |
| motif 1-11 | 6144_63_1025_161960_3 | 350 |
| motif 1-12 | G_max_Gm0041x00193_1 | 351 |
| motif 1-13 | G_max_Gm0076x00511_1 | 352 |
| motif 1-14 | G_max_TA60390_3847_1 | 353 |
| motif 1-15 | H_vulgare_TA44869_4513_1 | 354 |
| motif 1-16 | M_truncatula_AC161032_6_{—} | 355 |
| motif 1-17 | O_sativa_LOC_Os03g44810_{—} | 356 |
| motif 1-18 | P_patens_133289_1 | 357 |
| motif 1-19 | P_patens_181776_1 | 358 |
| motif 1-20 | P_sitchensis_TA12256_333 | 359 |
| motif 1-21 | P_taeda_TA11323_3352_1 | 360 |
| motif 1-22 | P_taeda_TA15528_3352_1 | 361 |
| motif 1-23 | P_taeda_TA9678_3352_1 | 362 |
| motif 1-24 | P_trichocarpa_572701_1 | 363 |
| motif 1-25 | P_trichocarpa_576441_1 | 364 |
| motif 1-26 | P_trichocarpa_644742_1 | 365 |
| motif 1-27 | P_trichocarpa_819318_1 | 366 |
| motif 1-28 | P_trichocarpa_scaff_VI_1 | 367 |
| motif 1-29 | S_bicolor_5264025_1 | 368 |
| motif 1-30 | S_moellendorffii_91888_1 | 369 |
| motif 1-31 | S_moellendorffii_93997_1 | 370 |
| motif 1-32 | V_vinifera_GSVIVT0002712 | 371 |
| motif 1-33 | V_vinifera_GSVIVT0002798 | 372 |
| motif 1-34 | Z_mays_ZM07MC03092_59138 | 373 |
| motif 1-35 | Z_mays_ZM07MSbpsHQ_57373 | 374 |
| motif 2-1 | 5143_27_992_4530_40_1 | 375 |
| motif 2-2 | A_thaliana_AT1G02860_1_1 | 376 |
| motif 2-3 | A_thaliana_AT1G02860_2_1 | 377 |
| motif 2-4 | A_thaliana_AT2G38920_1_1 | 378 |
| motif 2-5 | A_thaliana_AT2G38920_2_1 | 379 |
| motif 2-6 | A_thaliana_AT2G38920_3_1 | 380 |
| motif 2-7 | C_solstitialis_TA4428_34 | 381 |
| motif 2-8 | 6141_27_992_4530_39_1 | 382 |
| motif 2-9 | 6142_70_1089_4530_39_{—} | 383 |
| motif 2-10 | 6143_70_1020_161944_3 | 384 |
| motif 2-11 | 6144_63_1025_161960_3 | 385 |
| motif 2-12 | G_max_Gm0041x00193_1 | 386 |
| motif 2-13 | G_max_Gm0076x00511_1 | 387 |
| motif 2-14 | G_max_TA60390_3847_1 | 388 |
| motif 2-15 | H_vulgare_TA44869_4513_1 | 389 |
| motif 2-16 | M_truncatula_AC161032_6_{—} | 390 |
| motif 2-17 | O_sativa_LOC_Os03g44810_{—} | 391 |
| motif 2-18 | P_patens_133289_1 | 392 |
| motif 2-19 | P_patens_181776_1 | 393 |
| motif 2-20 | P_sitchensis_TA12256_333 | 394 |
| motif 2-21 | P_taeda_TA11323_3352_1 | 395 |
| motif 2-22 | P_taeda_TA15528_3352_1 | 396 |
| motif 2-23 | P_taeda_TA9678_3352_1 | 397 |
| motif 2-24 | P_trichocarpa_572701_1 | 398 |
| motif 2-25 | P_trichocarpa_576441_1 | 399 |
| motif 2-26 | P_trichocarpa_644742_1 | 400 |
| motif 2-27 | P_trichocarpa_819318_1 | 401 |
| motif 2-28 | P_trichocarpa_scaff_VI_1 | 402 |
| motif 2-29 | S_bicolor_5264025_1 | 403 |
| motif 2-30 | S_moellendorffii_91888_1 | 404 |
| motif 2-31 | S_moellendorffii_93997_1 | 405 |
| motif 2-32 | V_vinifera_GSVIVT0002712 | 406 |
| motif 2-33 | V_vinifera_GSVIVT0002798 | 407 |
| motif 2-34 | Z_mays_ZM07MC03092_59138 | 408 |
| motif 2-35 | Z_mays_ZM07MSbpsHQ_57373 | 409 |
| motif 3-1 | 5143_27_992_4530_40_1 | 410 |
| motif 3-2 | A_thaliana_AT1G02860_1_1 | 411 |
| motif 3-3 | A_thaliana_AT1G02860_2_1 | 412 |
| motif 3-4 | A_thaliana_AT2G38920_1_1 | 413 |
| motif 3-5 | A_thaliana_AT2G38920_2_1 | 414 |
| motif 3-6 | A_thaliana_AT2G38920_3_1 | 415 |
| motif 3-7 | C_solstitialis_TA4428_34 | 416 |
| motif 3-8 | 6141_27_992_4530_39_1 | 417 |
| motif 3-9 | 6142_70_1089_4530_39_{—} | 418 |
| motif 3-10 | 6143_70_1020_161944_3 | 419 |
| motif 3-11 | 6144_63_1025_161960_3 | 420 |
| motif 3-12 | G_max_Gm0041x00193_1 | 421 |
| motif 3-13 | G_max_Gm0076x00511_1 | 422 |
| motif 3-14 | G_max_TA60390_3847_1 | 423 |
| motif 3-15 | H_vulgare_TA44869_4513_1 | 424 |
| motif 3-16 | M_truncatula_AC161032_6_{—} | 425 |
| motif 3-17 | O_sativa_LOC_Os03g44810_{—} | 426 |
| motif 3-18 | P_patens_133289_1 | 427 |
| motif 3-19 | P_patens_181776_1 | 428 |
| motif 3-20 | P_sitchensis_TA12256_333 | 429 |
| motif 3-21 | P_taeda_TA11323_3352_1 | 430 |
| motif 3-22 | P_taeda_TA15528_3352_1 | 431 |
| motif 3-23 | P_taeda_TA9678_3352_1 | 432 |
| motif 3-24 | P_trichocarpa_572701_1 | 433 |
| motif 3-25 | P_trichocarpa_576441_1 | 434 |
| motif 3-26 | P_trichocarpa_644742_1 | 435 |
| motif 3-27 | P_trichocarpa_819318_1 | 436 |
| motif 3-28 | P_trichocarpa_scaff_VI_1 | 437 |
| motif 3-29 | S_bicolor_5264025_1 | 438 |
| motif 3-30 | S_moellendorffii_91888_1 | 439 |
| motif 3-31 | S_moellendorffii_93997_1 | 440 |
| motif 3-32 | V_vinifera_GSVIVT0002712 | 441 |
| motif 3-33 | V_vinifera_GSVIVT0002798 | 442 |
| motif 3-34 | Z_mays_ZM07MC03092_59138 | 443 |
| motif 3-35 | Z_mays_ZM07MSbpsHQ_57373 | 444 |

### Example 6

### Topology Prediction of the Polypeptide Sequences Useful in Performing the Methods of the Invention

### 6.1. Cofactor Required for Sp1 Activation (CRSP) Polypeptides

[0651] TargetP 1.1 predicts the subcellular location of eukaryotic proteins. The location assignment is based on the predicted presence of any of the N-terminal pre-sequences: chloroplast transit peptide (cTP), mitochondrial targeting peptide (mTP) or secretory pathway signal peptide (SP). Scores on which the final prediction is based are not really probabilities, and they do not necessarily add to one. However, the location with the highest score is the most likely according to TargetP, and the relationship between the scores (the reliability class) may be an indication of how certain the prediction is. The reliability class (RC) ranges from 1 to 5, where 1 indicates the strongest prediction. TargetP is maintained at the server of the Technical University of Denmark.

[0652] For the sequences predicted to contain an N-terminal presequence a potential cleavage site can also be predicted.

[0653] A number of parameters are selected, such as organism group (non-plant or plant), cutoff sets (none, predefined set of cutoffs, or user-specified set of cutoffs), and the calculation of prediction of cleavage sites (yes or no).

[0654] Many other algorithms can be used to perform such analyses, including:
[0655] ChloroP 1.1 hosted on the server of the Technical University of Denmark;
[0656] Protein Prowler Subcellular Localisation Predictor version 1.2 hosted on the server of the Institute for Molecular Bioscience, University of Queensland, Brisbane, Australia;
[0657] PENCE Proteome Analyst PA-GOSUB 2.5 hosted on the server of the University of Alberta, Edmonton, Alberta, Canada;
[0658] TMHMM, hosted on the server of the Technical University of Denmark
[0659] PSORT (URL: psort.org)
[0660] PLOC (Park and Kanehisa, Bioinformatics, 19, 1656-1663, 2003).

### 6.2. Myb-Related CAB Promoter-Binding (MCB) Polypeptides

[0661] TargetP 1.1 predicts the subcellular location of eukaryotic proteins. The location assignment is based on the predicted presence of any of the N-terminal pre-sequences: chloroplast transit peptide (cTP), mitochondrial targeting peptide (mTP) or secretory pathway signal peptide (SP). Scores on which the final prediction is based are not really probabilities, and they do not necessarily add to one. However, the location with the highest score is the most likely according to TargetP, and the relationship between the scores (the reliability class) may be an indication of how certain the prediction is. The reliability class (RC) ranges from 1 to 5, where 1 indicates the strongest prediction. TargetP is maintained at the server of the Technical University of Denmark.

[0662] For the sequences predicted to contain an N-terminal presequence a potential cleavage site can also be predicted.

[0663] A number of parameters were selected, such as organism group (non-plant or plant), cutoff sets (none, predefined set of cutoffs, or user-specified set of cutoffs), and the calculation of prediction of cleavage sites (yes or no).

[0664] Many other algorithms can be used to perform such analyses, including:
[0665] ChloroP 1.1 hosted on the server of the Technical University of Denmark;
[0666] Protein Prowler Subcellular Localisation Predictor version 1.2 hosted on the server of the Institute for Molecular Bioscience, University of Queensland, Brisbane, Australia;
[0667] PENCE Proteome Analyst PA-GOSUB 2.5 hosted on the server of the University of Alberta, Edmonton, Alberta, Canada;
[0668] TMHMM, hosted on the server of the Technical University of Denmark
[0669] PSORT (URL: psort.org)
[0670] PLOC (Park and Kanehisa, Bioinformatics, 19, 1656-1663, 2003).

### 6.3. Sirtuin 2 or Silent Information Regulator 2 (SRT2) Polypeptides

[0671] TargetP 1.1 predicts the subcellular location of eukaryotic proteins. The location assignment is based on the predicted presence of any of the N-terminal pre-sequences: chloroplast transit peptide (cTP), mitochondrial targeting peptide (mTP) or secretory pathway signal peptide (SP). Scores on which the final prediction is based are not really probabilities, and they do not necessarily add to one. However, the location with the highest score is the most likely according to TargetP, and the relationship between the scores (the reliability class) may be an indication of how certain the prediction is. The reliability class (RC) ranges from 1 to 5, where 1 indicates the strongest prediction. TargetP is maintained at the server of the Technical University of Denmark.

[0672] For the sequences predicted to contain an N-terminal presequence a potential cleavage site can also be predicted.

### 6.4. YRP2 Polypeptides

[0673] TargetP 1.1 predicts the subcellular location of eukaryotic proteins. The location assignment is based on the predicted presence of any of the N-terminal pre-sequences: chloroplast transit peptide (cTP), mitochondrial targeting peptide (mTP) or secretory pathway signal peptide (SP). Scores on which the final prediction is based are not really probabilities, and they do not necessarily add to one. However, the location with the highest score is the most likely according to TargetP, and the relationship between the scores (the reliability class) may be an indication of how certain the prediction is. The reliability class (RC) ranges from 1 to 5, where 1 indicates the strongest prediction. TargetP is maintained at the server of the Technical University of Denmark. For the sequences predicted to contain an N-terminal presequence a potential cleavage site can also be predicted.

[0674] A number of parameters are selected, such as organism group (non-plant or plant), cutoff sets (none, predefined set of cutoffs, or user-specified set of cutoffs), and the calculation of prediction of cleavage sites (yes or no).

[0675] Many other algorithms can be used to perform such analyses, including:
[0676] ChloroP 1.1 hosted on the server of the Technical University of Denmark;
[0677] Protein Prowler Subcellular Localisation Predictor version 1.2 hosted on the server of the Institute for Molecular Bioscience, University of Queensland, Brisbane, Australia;
[0678] PENCE Proteome Analyst PA-GOSUB 2.5 hosted on the server of the University of Alberta, Edmonton, Alberta, Canada;
[0679] TMHMM, hosted on the server of the Technical University of Denmark
[0680] PSORT (URL: psort.org)
[0681] PLOC (Park and Kanehisa, Bioinformatics, 19, 1656-1663, 2003).

### 6.5. YRP3 Polypeptides

[0682] TargetP 1.1 predicts the subcellular location of eukaryotic proteins. The location assignment is based on the predicted presence of any of the N-terminal pre-sequences: chloroplast transit peptide (cTP), mitochondrial targeting peptide (mTP) or secretory pathway signal peptide (SP). Scores on which the final prediction is based are not really probabilities, and they do not necessarily add to one. However, the location with the highest score is the most likely according to TargetP, and the relationship between the scores (the reliability class) may be an indication of how certain the prediction is. The reliability class (RC) ranges from 1 to 5, where 1 indicates the strongest prediction. TargetP is maintained at the server of the Technical University of Denmark. For the sequences predicted to contain an N-terminal presequence a potential cleavage site can also be predicted.

[0683] A number of parameters are selected, such as organism group (non-plant or plant), cutoff sets (none, predefined set of cutoffs, or user-specified set of cutoffs), and the calculation of prediction of cleavage sites (yes or no).

[0684] Many other algorithms can be used to perform such analyses, including:
[0685] ChloroP 1.1 hosted on the server of the Technical University of Denmark;
[0686] Protein Prowler Subcellular Localisation Predictor version 1.2 hosted on the server of the Institute for Molecular Bioscience, University of Queensland, Brisbane, Australia;
[0687] PENCE Proteome Analyst PA-GOSUB 2.5 hosted on the server of the University of Alberta, Edmonton, Alberta, Canada;
[0688] TMHMM, hosted on the server of the Technical University of Denmark
[0689] PSORT (URL: psort.org)
[0690] PLOC (Park and Kanehisa, Bioinformatics, 19, 1656-1663, 2003).

### 6.6. YRP4 Polypeptides

[0691] TargetP 1.1 predicts the subcellular location of eukaryotic proteins. The location assignment is based on the predicted presence of any of the N-terminal pre-sequences: chloroplast transit peptide (cTP), mitochondrial targeting peptide (mTP) or secretory pathway signal peptide (SP). Scores on which the final prediction is based are not really probabilities, and they do not necessarily add to one. However, the location with the highest score is the most likely according to TargetP, and the relationship between the scores (the reliability class) may be an indication of how certain the prediction is. The reliability class (RC) ranges from 1 to 5, where 1 indicates the strongest prediction. TargetP is maintained at the server of the Technical University of Denmark. For the sequences predicted to contain an N-terminal presequence a potential cleavage site can also be predicted.

[0692] A number of parameters are selected, such as organism group (non-plant or plant), cutoff sets (none, predefined set of cutoffs, or user-specified set of cutoffs), and the calculation of prediction of cleavage sites (yes or no).

[0693] Many other algorithms can be used to perform such analyses, including:
[0694] ChloroP 1.1 hosted on the server of the Technical University of Denmark;
[0695] Protein Prowler Subcellular Localisation Predictor version 1.2 hosted on the server of the Institute for Molecular Bioscience, University of Queensland, Brisbane, Australia;
[0696] PENCE Proteome Analyst PA-GOSUB 2.5 hosted on the server of the University of Alberta, Edmonton, Alberta, Canada;
[0697] TMHMM, hosted on the server of the Technical University of Denmark
[0698] PSORT (URL: psort.org)
[0699] PLOC (Park and Kanehisa, Bioinformatics, 19, 1656-1663, 2003).

### 6.7. SPX-RING (SYG1, Pho81, XPR1-Zinc Finger, RING-Type) Polypeptides

[0700] TargetP 1.1 predicts the subcellular location of eukaryotic proteins. The location assignment is based on the predicted presence of any of the N-terminal pre-sequences: chloroplast transit peptide (cTP), mitochondrial targeting peptide (mTP) or secretory pathway signal peptide (SP). Scores on which the final prediction is based are not really probabilities, and they do not necessarily add to one. However, the location with the highest score is the most likely according to TargetP, and the relationship between the scores (the reliability class) may be an indication of how certain the prediction is. The reliability class (RC) ranges from 1 to 5, where 1 indicates the strongest prediction. TargetP is maintained at the server of the Technical University of Denmark.

[0701] For the sequences predicted to contain an N-terminal presequence a potential cleavage site can also be predicted.

[0702] Many other algorithms can be used to perform such analyses, including:
[0703] ChloroP 1.1 hosted on the server of the Technical University of Denmark;
[0704] Protein Prowler Subcellular Localisation Predictor version 1.2 hosted on the server of the Institute for Molecular Bioscience, University of Queensland, Brisbane, Australia;
[0705] PENCE Proteome Analyst PA-GOSUB 2.5 hosted on the server of the University of Alberta, Edmonton, Alberta, Canada;
[0706] TMHMM, hosted on the server of the Technical University of Denmark
[0707] PSORT (URL: psort.org)
[0708] PLOC (Park and Kanehisa, Bioinformatics, 19, 1656-1663, 2003).

### Example 7

### Cloning of the Nucleic Acid Sequence Used in the Methods of the Invention

### 7.1. Cofactor Required for Sp1 Activation (CRSP) Polypeptides

[0709] The nucleic acid sequence of SEQ ID NO: 1 was amplified by PCR using as template a cDNA library (in pCMV Sport 6.0; Invitrogen, Paisley, UK). PCR was performed using Hifi Taq DNA polymerase in standard conditions, using 200 ng of template in a 50 μl PCR mix. The primers used were prm09914 (SEQ ID NO: 39; sense, start codon in bold): 5′ aaaaagcaggctcaca atggagaatgggaaaagagac-3′ and prm09915 (SEQ ID NO: 40; reverse, complementary): 5′-agaaagctgggttggttttaactagttccaccg-3′, which include the AttB sites for Gateway recombination. The amplified PCR fragment was purified also using standard methods. The first step of the Gateway procedure, the BP reaction, was then performed, during which the PCR fragment recombined in vivo with the pDONR201 plasmid to produce, according to the Gateway terminology, an “entry clone”, pCRSP33-like. Plasmid pDONR201 was purchased from Invitrogen, as part of the Gateway® technology.

[0710] The entry clone comprising SEQ ID NO: 1 was then used in an LR reaction with a destination vector used for Oryza sativa transformation. This vector contained as functional elements within the T-DNA borders: a plant selectable marker; a screenable marker expression cassette; and a Gateway cassette intended for LR in vivo recombination with the nucleic acid sequence of interest already cloned in the entry clone. A rice GOS2 promoter (SEQ ID NO: 43) for constitutive specific expression was located upstream of this Gateway cassette.

[0711] After the LR recombination step, the resulting expression vector pGOS2::CRSP33-like (FIG. 3) was transformed into Agrobacterium strain LBA4044 according to methods well known in the art.

### 7.2. Myb-Related CAB Promoter-Binding (MCB) Polypeptides

[0712] The nucleic acid sequence used in the methods of the invention was amplified by PCR using as template a custom-made Triticum aestivum seedlings cDNA library (in pCMV Sport 6.0; Invitrogen, Paisley, UK). PCR was performed using Hifi Taq DNA polymerase in standard conditions, using 200 ng of template in a 50 μl PCR mix. The primers used were (SEQ ID NO: 195; sense, start codon in bold): 5′-ggggacaagtttgtacaaaaaagcaggcttaaacaatg gagacaaattcgtctgga-3′ and (SEQ ID NO: 196; reverse, complementary): 5′-ggg gaccactttgtacaagaaagctgggtgaaaatagagtctcatgtggaagc-3′, which include the AttB sites for Gateway recombination. The amplified PCR fragment was purified also using standard methods. The first step of the Gateway procedure, the BP reaction, was then performed, during which the PCR fragment recombined in vivo with the pDONR201 plasmid to produce, according to the Gateway terminology, an “entry clone”, pMCB. Plasmid pDONR201 was purchased from Invitrogen, as part of the Gateway® technology.

[0713] The entry clone comprising SEQ ID NO: 44 was then used in an LR reaction with a destination vector used for Oryza sativa transformation. This vector contained as functional elements within the T-DNA borders: a plant selectable marker; a screenable marker expression cassette; and a Gateway cassette intended for LR in vivo recombination with the nucleic acid sequence of interest already cloned in the entry clone. A rice GOS2 promoter (SEQ ID NO: 197) for constitutive specific expression was located upstream of this Gateway cassette.

[0714] After the LR recombination step, the resulting expression vector pGOS2::MCB (FIG. 5) was transformed into Agrobacterium strain LBA4044 according to methods well known in the art.

### 7.3. Sirtuin 2 or Silent Information Regulator 2 (SRT2) Polypeptides

[0715] The nucleic acid sequence used in the methods of the invention was amplified by PCR using as template a custom-made Oryza sativa seedlings cDNA library (in pCMV Sport 6.0; Invitrogen, Paisley, UK). PCR was performed using Hifi Taq DNA polymerase in standard conditions, using 200 ng of template in a 50 μl PCR mix. The primers used were (SEQ ID NO: 228; sense, start codon in bold): 5′-ggggacaagtttgtacaaaaaagcaggcttaaa caatggcggcgggg-3′ and (SEQ ID NO: 229; reverse, complementary): 5′-ggggaccact ttgtacaagaaagctgggtgcaccagcttaacttacgttt-3′, which include the AttB sites for Gateway recombination. The amplified PCR fragment was purified also using standard methods. The first step of the Gateway procedure, the BP reaction, was then performed, during which the PCR fragment recombined in vivo with the pDONR201 plasmid to produce, according to the Gateway terminology, an “entry clone”, pOs_SRT2. Plasmid pDONR201 was purchased from Invitrogen, as part of the Gateway® technology.

[0716] The entry clone comprising SEQ ID NO: 198 was then used in an LR reaction with a destination vector used for Oryza sativa transformation. This vector contained as functional elements within the T-DNA borders: a plant selectable marker; a screenable marker expression cassette; and a Gateway cassette intended for LR in vivo recombination with the nucleic acid sequence of interest already cloned in the entry clone. A rice GOS2 promoter (SEQ ID NO: 230) for constitutive specific expression was located upstream of this Gateway cassette.

[0717] After the LR recombination step, the resulting expression vector pGOS2::SRT2 (FIG. 7) was transformed into Agrobacterium strain LBA4044 according to methods well known in the art.

### 7.4. YRP2 Polypeptides

[0718] The nucleic acid sequence is amplified by PCR using as template a cDNA library (in pCMV Sport 6.0; Invitrogen, Paisley, UK). PCR is performed using Hifi Taq DNA polymerase in standard conditions, using 200 ng of template in a 50 μl PCR mix. The primers include the AttB sites for Gateway recombination. The amplified PCR fragment is purified also using standard methods. The first step of the Gateway procedure, the BP reaction, is then performed, during which the PCR fragment recombines in vivo with the pDONR201 plasmid to produce, according to the Gateway terminology, an “entry clone”. Plasmid pDONR201 is purchased from Invitrogen, as part of the Gateway® technology.

[0719] The entry clone comprising SEQ ID NO: 234, SEQ ID NO: 236 or SEQ ID NO: 238 is then used in an LR reaction with a destination vector used for Oryza sativa transformation. This vector contains as functional elements within the T-DNA borders: a plant selectable marker; a screenable marker expression cassette; and a Gateway cassette intended for LR in vivo recombination with the nucleic acid sequence of interest already cloned in the entry clone. A rice GOS2 promoter (SEQ ID NO: 241) for constitutive expression is located upstream of this Gateway cassette.

[0720] After the LR recombination step, the resulting expression vector pGOS2::YRP2 (FIG. 8) is transformed into Agrobacterium strain LBA4044 according to methods well known in the art.

### 7.5. YRP3 Polypeptides

[0721] The nucleic acid sequence is amplified by PCR using as template a cDNA library (in pCMV Sport 6.0; Invitrogen, Paisley, UK). PCR is performed using Hifi Taq DNA polymerase in standard conditions, using 200 ng of template in a 50 μl PCR mix. The primers include the AttB sites for Gateway recombination. The amplified PCR fragment is purified also using standard methods. The first step of the Gateway procedure, the BP reaction, is then performed, during which the PCR fragment recombines in vivo with the pDONR201 plasmid to produce, according to the Gateway terminology, an “entry clone”. Plasmid pDONR201 is purchased from Invitrogen, as part of the Gateway® technology.

[0722] The entry clone comprising SEQ ID NO: 244, SEQ ID NO: 246, SEQ. ID NO: 248, SEQ ID NO: 250, SEQ ID NO: 252 or SEQ ID NO: 254 is then used in an LR reaction with a destination vector used for Oryza sativa transformation. This vector contains as functional elements within the T-DNA borders: a plant selectable marker; a screenable marker expression cassette; and a Gateway cassette intended for LR in vivo recombination with the nucleic acid sequence of interest already cloned in the entry clone. A rice GOS2 promoter (SEQ ID NO: 256) for constitutive expression is located upstream of this Gateway cassette.

[0723] After the LR recombination step, the resulting expression vector pGOS2::YRP3 (FIG. 9) is transformed into Agrobacterium strain LBA4044 according to methods well known in the art.

### 7.6. YRP4 Polypeptides

[0724] The nucleic acid sequence is amplified by PCR using as template a cDNA library (in pCMV Sport 6.0; Invitrogen, Paisley, UK). PCR is performed using Hifi Taq DNA polymerase in standard conditions, using 200 ng of template in a 50 μl PCR mix. The primers include the AttB sites for Gateway recombination. The amplified PCR fragment is purified also using standard methods. The first step of the Gateway procedure, the BP reaction, is then performed, during which the PCR fragment recombines in vivo with the pDONR201 plasmid to produce, according to the Gateway terminology, an “entry clone”. Plasmid pDONR201 is purchased from Invitrogen, as part of the Gateway® technology.

[0725] The entry clone comprising SEQ ID NO: 261 or SEQ ID NO: 263 is then used in an LR reaction with a destination vector used for Oryza sativa transformation. This vector contains as functional elements within the T-DNA borders: a plant selectable marker; a screenable marker expression cassette; and a Gateway cassette intended for LR in vivo recombination with the nucleic acid sequence of interest already cloned in the entry clone. A rice GOS2 promoter (SEQ ID NO: 265) for constitutive expression is located upstream of this Gateway cassette.

[0726] After the LR recombination step, the resulting expression vector pGOS2::YRP4 (FIG. 10) is transformed into Agrobacterium strain LBA4044 according to methods well known in the art.

### 7.7. SPX-RING (SYG1, Pho81, XPR1-Zinc Finger, RING-Type) Polypeptides

[0727] The nucleic acid sequence used in the methods of the invention was amplified by PCR using as template a custom-made Oryza sativa seedlings cDNA library (in pCMV Sport 6.0; Invitrogen, Paisley, UK). PCR was performed using Hifi Taq DNA polymerase in standard conditions, using 200 ng of template in a 50 μl PCR mix. The primers used were (SEQ ID NO: 445; sense, start codon in bold): 5′-ggggacaagtttgtacaaaaaagcaggcttaaacaa tgaagtttgccaagaagtac-3′ and (SEQ ID NO: 446; reverse, complementary): 5′-gggga ccactttgtacaagaaagctgggtaaaaatccaccaactttagaa-3′, which include the AttB sites for Gateway recombination. The amplified PCR fragment was purified also using standard methods. The first step of the Gateway procedure, the BP reaction, was then performed, during which the PCR fragment recombined in vivo with the pDONR201 plasmid to produce, according to the Gateway terminology, an “entry clone”, pSPX-RING. Plasmid pDONR201 was purchased from Invitrogen, as part of the Gateway® technology.

[0728] The entry clone comprising SEQ ID NO: 270 was then used in an LR reaction with a destination vector used for Oryza sativa transformation. This vector contained as functional elements within the T-DNA borders: a plant selectable marker; a screenable marker expression cassette; and a Gateway cassette intended for LR in vivo recombination with the nucleic acid sequence of interest already cloned in the entry clone. A rice GOS2 promoter (SEQ IID NO: 447) for constitutive specific expression was located upstream of this Gateway cassette.

[0729] After the LR recombination step, the resulting expression vector pGOS2::SPX-RING (FIG. 12) was transformed into Agrobacterium strain LBA4044 according to methods well known in the art.

### Example 8

### Plant Transformation

### Rice Transformation

[0730] The Agrobacterium containing the expression vector was used to transform Oryza sativa plants. Mature dry seeds of the rice japonica cultivar Nipponbare were dehusked. Sterilization was carried out by incubating for one minute in 70% ethanol, followed by 30 minutes in 0.2% HgC12, followed by a 6 times 15 minutes wash with sterile distilled water. The sterile seeds were then germinated on a medium containing 2,4-D (callus induction medium). After incubation in the dark for four weeks, embryogenic, scutellum-derived calli were excised and propagated on the same medium. After two weeks, the calli were multiplied or propagated by subculture on the same medium for another 2 weeks. Embryogenic callus pieces were sub-cultured on fresh medium 3 days before co-cultivation (to boost cell division activity).

[0731] Agrobacterium strain LBA4404 containing the expression vector was used for co-cultivation. Agrobacterium was inoculated on AB medium with the appropriate antibiotics and cultured for 3 days at 28° C. The bacteria were then collected and suspended in liquid co-cultivation medium to a density (OD600) of about 1. The suspension was then transferred to a Petri dish and the calli immersed in the suspension for 15 minutes. The callus tissues were then blotted dry on a filter paper and transferred to solidified, co-cultivation medium and incubated for 3 days in the dark at 25° C. Co-cultivated calli were grown on 2,4-D-containing medium for 4 weeks in the dark at 28° C. in the presence of a selection agent. During this period, rapidly growing resistant callus islands developed. After transfer of this material to a regeneration medium and incubation in the light, the embryogenic potential was released and shoots developed in the next four to five weeks. Shoots were excised from the calli and incubated for 2 to 3 weeks on an auxin-containing medium from which they were transferred to soil. Hardened shoots were grown under high humidity and short days in a greenhouse.

[0732] Approximately 35 independent TO rice transformants were generated for one construct. The primary transformants were transferred from a tissue culture chamber to a greenhouse. After a quantitative PCR analysis to verify copy number of the T-DNA insert, only single copy transgenic plants that exhibit tolerance to the selection agent were kept for harvest of T1 seed. Seeds were then harvested three to five months after transplanting. The method yielded single locus transformants at a rate of over 50% (Aldemita and Hodges 1996, Chan et al. 1993, Hiei et al. 1994).

### Example 9

### Transformation of Other Crops

### Corn Transformation

[0733] Transformation of maize (Zea mays) is performed with a modification of the method described by Ishida et al. (1996) Nature Biotech 14(6): 745-50. Transformation is genotype-dependent in corn and only specific genotypes are amenable to transformation and regeneration. The inbred line A188 (University of Minnesota) or hybrids with A188 as a parent are good sources of donor material for transformation, but other genotypes can be used successfully as well. Ears are harvested from corn plant approximately 11 days after pollination (DAP) when the length of the immature embryo is about 1 to 1.2 mm. Immature embryos are cocultivated with Agrobacterium tumefaciens containing the expression vector, and transgenic plants are recovered through organogenesis. Excised embryos are grown on callus induction medium, then maize regeneration medium, containing the selection agent (for example imidazolinone but various selection markers can be used). The Petri plates are incubated in the light at 25° C. for 2-3 weeks, or until shoots develop. The green shoots are transferred from each embryo to maize rooting medium and incubated at 25° C. for 2-3 weeks, until roots develop. The rooted shoots are transplanted to soil in the greenhouse. T1 seeds are produced from plants that exhibit tolerance to the selection agent and that contain a single copy of the T-DNA insert.

### Wheat Transformation

[0734] Transformation of wheat is performed with the method described by Ishida et al. (1996) Nature Biotech 14(6): 745-50. The cultivar Bobwhite (available from CIMMYT, Mexico) is commonly used in transformation. Immature embryos are co-cultivated with Agrobacterium tumefaciens containing the expression vector, and transgenic plants are recovered through organogenesis. After incubation with Agrobacterium, the embryos are grown in vitro on callus induction medium, then regeneration medium, containing the selection agent (for example imidazolinone but various selection markers can be used). The Petri plates are incubated in the light at 25° C. for 2-3 weeks, or until shoots develop. The green shoots are transferred from each embryo to rooting medium and incubated at 25° C. for 2-3 weeks, until roots develop. The rooted shoots are transplanted to soil in the greenhouse. T1 seeds are produced from plants that exhibit tolerance to the selection agent and that contain a single copy of the T-DNA insert.

### Soybean Transformation

[0735] Soybean is transformed according to a modification of the method described in the Texas A&M patent U.S. Pat. No. 5,164,310. Several commercial soybean varieties are amenable to transformation by this method. The cultivar Jack (available from the Illinois Seed foundation) is commonly used for transformation. Soybean seeds are sterilised for in vitro sowing. The hypocotyl, the radicle and one cotyledon are excised from seven-day old young seedlings. The epicotyl and the remaining cotyledon are further grown to develop axillary nodes. These axillary nodes are excised and incubated with Agrobacterium tumefaciens containing the expression vector. After the cocultivation treatment, the explants are washed and transferred to selection media. Regenerated shoots are excised and placed on a shoot elongation medium. Shoots no longer than 1 cm are placed on rooting medium until roots develop. The rooted shoots are transplanted to soil in the greenhouse. T1 seeds are produced from plants that exhibit tolerance to the selection agent and that contain a single copy of the T-DNA insert.

### Rapeseed/Canola Transformation

[0736] Cotyledonary petioles and hypocotyls of 5-6 day old young seedling are used as explants for tissue culture and transformed according to Babic et al. (1998, Plant Cell Rep 17: 183-188). The commercial cultivar Westar (Agriculture Canada) is the standard variety used for transformation, but other varieties can also be used. Canola seeds are surface-sterilized for in vitro sowing. The cotyledon petiole explants with the cotyledon attached are excised from the in vitro seedlings, and inoculated with Agrobacterium (containing the expression vector) by dipping the cut end of the petiole explant into the bacterial suspension. The explants are then cultured for 2 days on MSBAP-3 medium containing 3 mg/l BAP, 3% sucrose, 0.7% Phytagar at 23° C., 16 hr light. After two days of co-cultivation with Agrobacterium, the petiole explants are transferred to MSBAP-3 medium containing 3 mg/l BAP, cefotaxime, carbenicillin, or timentin (300 mg/l) for 7 days, and then cultured on MSBAP-3 medium with cefotaxime, carbenicillin, or timentin and selection agent until shoot regeneration. When the shoots are 5-10 mm in length, they are cut and transferred to shoot elongation medium (MSBAP-0.5, containing 0.5 mg/l BAP). Shoots of about 2 cm in length are transferred to the rooting medium (MS0) for root induction. The rooted shoots are transplanted to soil in the greenhouse. T1 seeds are produced from plants that exhibit tolerance to the selection agent and that contain a single copy of the T-DNA insert.

### Alfalfa Transformation

[0737] A regenerating clone of alfalfa (Medicago sativa) is transformed using the method of (McKersie et al., 1999 Plant Physiol 119: 839-847). Regeneration and transformation of alfalfa is genotype dependent and therefore a regenerating plant is required. Methods to obtain regenerating plants have been described. For example, these can be selected from the cultivar Rangelander (Agriculture Canada) or any other commercial alfalfa variety as described by Brown DCW and A Atanassov (1985. Plant Cell Tissue Organ Culture 4: 111-112). Alternatively, the RA3 variety (University of Wisconsin) has been selected for use in tissue culture (Walker et al., 1978 Am J Bot 65:654-659). Petiole explants are cocultivated with an overnight culture of Agrobacterium tumefaciens C58C1 pMP90 (McKersie et al., 1999 Plant Physiol 119: 839-847) or LBA4404 containing the expression vector. The explants are cocultivated for 3 d in the dark on SH induction medium containing 288 mg/L Pro, 53 mg/L thioproline, 4.35 g/L K2SO4, and 100 μm acetosyringinone. The explants are washed in half-strength Murashige-Skoog medium (Murashige and Skoog, 1962) and plated on the same SH induction medium without acetosyringinone but with a suitable selection agent and suitable antibiotic to inhibit Agrobacterium growth. After several weeks, somatic embryos are transferred to BOi2Y development medium containing no growth regulators, no antibiotics, and 50 g/L sucrose. Somatic embryos are subsequently germinated on half-strength Murashige-Skoog medium. Rooted seedlings were transplanted into pots and grown in a greenhouse. T1 seeds are produced from plants that exhibit tolerance to the selection agent and that contain a single copy of the T-DNA insert.

### Cotton Transformation

[0738] Cotton is transformed using Agrobacterium tumefaciens according to the method described in U.S. Pat. No. 5,159,135. Cotton seeds are surface sterilised in 3% sodium hypochlorite solution during 20 minutes and washed in distilled water with 500 μg/ml cefotaxime. The seeds are then transferred to SH-medium with 50 μg/ml benomyl for germination. Hypocotyls of 4 to 6 days old seedlings are removed, cut into 0.5 cm pieces and are placed on 0.8% agar. An Agrobacterium suspension (approx. 108 cells per ml, diluted from an overnight culture transformed with the gene of interest and suitable selection markers) is used for inoculation of the hypocotyl explants. After 3 days at room temperature and lighting, the tissues are transferred to a solid medium (1.6 g/l Gelrite) with Murashige and Skoog salts with B5 vitamins (Gamborg et al., Exp. Cell Res. 50:151-158 (1968)), 0.1 mg/l 2,4-D, 0.1 mg/l 6-furfurylaminopurine and 750 μg/ml MgCL2, and with 50 to 100 μg/ml cefotaxime and 400-500 μg/ml carbenicillin to kill residual bacteria. Individual cell lines are isolated after two to three months (with subcultures every four to six weeks) and are further cultivated on selective medium for tissue amplification (30° C., 16 hr photoperiod). Transformed tissues are subsequently further cultivated on non-selective medium during 2 to 3 months to give rise to somatic embryos. Healthy looking embryos of at least 4 mm length are transferred to tubes with SH medium in fine vermiculite, supplemented with 0.1 mg/l indole acetic acid, 6 furfurylaminopurine and gibberellic acid. The embryos are cultivated at 30° C. with a photoperiod of 16 hrs, and plantlets at the 2 to 3 leaf stage are transferred to pots with vermiculite and nutrients. The plants are hardened and subsequently moved to the greenhouse for further cultivation.

### Example 10

### Phenotypic Evaluation Procedure

### 10.1 Evaluation Setup

[0739] Approximately 35 independent TO rice transformants were generated. The primary transformants were transferred from a tissue culture chamber to a greenhouse for growing and harvest of T1 seed. Six events, of which the T1 progeny segregated 3:1 for presence/absence of the transgene, were retained. For each of these events, approximately 10 T1 seedlings containing the transgene (hetero- and homo-zygotes) and approximately 10 T1 seedlings lacking the transgene (nullizygotes) were selected by monitoring visual marker expression. The transgenic plants and the corresponding nullizygotes were grown side-by-side at random positions. Greenhouse conditions were of shorts days (12 hours light), 28° C. in the light and 22° C. in the dark, and a relative humidity of 70%. Plants grown under non-stress conditions were watered at regular intervals to ensure that water and nutrients were not limiting and to satisfy plant needs to complete growth and development.

[0740] Four T1 events were further evaluated in the T2 generation following the same evaluation procedure as for the T1 generation but with more individuals per event. From the stage of sowing until the stage of maturity the plants were passed several times through a digital imaging cabinet. At each time point digital images (2048×1536 pixels, 16 million colours) were taken of each plant from at least 6 different angles.

### Drought Screen

[0741] Plants from T2 seeds were grown in potting soil under normal conditions until they approached the heading stage. They were then transferred to a “dry” section where irrigation was withheld. Humidity probes were inserted in randomly chosen pots to monitor the soil water content (SWC). When SWC went below certain thresholds, the plants were automatically re-watered continuously until a normal level was reached again. The plants were then re-transferred again to normal conditions. The rest of the cultivation (plant maturation, seed harvest) was the same as for plants not grown under abiotic stress conditions. Growth and yield parameters were recorded as detailed for growth under normal conditions.

### Nitrogen Use Efficiency Screen

[0742] Rice plants from T2 seeds are grown in potting soil under normal conditions except for the nutrient solution. The pots are watered from transplantation to maturation with a specific nutrient solution containing reduced N nitrogen (N) content, usually between 7 to 8 times less. The rest of the cultivation (plant maturation, seed harvest) is the same as for plants not grown under abiotic stress. Growth and yield parameters are recorded as detailed for growth under normal conditions.

### Salt Stress Screen

[0743] Plants are grown on a substrate made of coco fibers and argex (3 to 1 ratio). A normal nutrient solution is used during the first two weeks after transplanting the plantlets in the greenhouse. After the first two weeks, 25 mM of salt (NaCl) is added to the nutrient solution, until the plants are harvested. Seed-related parameters are then measured.

### 10.2 Statistical Analysis: F Test

[0744] A two factor ANOVA (analysis of variants) was used as a statistical model for the overall evaluation of plant phenotypic characteristics. An F test was carried out on all the parameters measured of all the plants of all the events transformed with the gene of the present invention. The F test was carried out to check for an effect of the gene over all the transformation events and to verify for an overall effect of the gene, also known as a global gene effect. The threshold for significance for a true global gene effect was set at a 5% probability level for the F test. A significant F test value points to a gene effect, meaning that it is not only the mere presence or position of the gene that is causing the differences in phenotype.

[0745] Because two experiments with overlapping events were carried out, a combined analysis was performed. This is useful to check consistency of the effects over the two experiments, and if this is the case, to accumulate evidence from both experiments in order to increase confidence in the conclusion. The method used was a mixed-model approach that takes into account the multilevel structure of the data (i.e. experiment—event—segregants). P values were obtained by comparing likelihood ratio test to chi square distributions.

### 10.3 Parameters Measured

### Biomass-Related Parameter Measurement

[0746] From the stage of sowing until the stage of maturity the plants were passed several times through a digital imaging cabinet. At each time point digital images (2048×1536 pixels, 16 million colours) were taken of each plant from at least 6 different angles.

[0747] The plant aboveground area (or leafy biomass) was determined by counting the total number of pixels on the digital images from aboveground plant parts discriminated from the background. This value was averaged for the pictures taken on the same time point from the different angles and was converted to a physical surface value expressed in square mm by calibration. Experiments show that the aboveground plant area measured this way correlates with the biomass of plant parts above ground. The above ground area is the area measured at the time point at which the plant had reached its maximal leafy biomass. The early vigour is the plant (seedling) aboveground area three weeks post-germination. Increase in root biomass is expressed as an increase in total root biomass (measured as maximum biomass of roots observed during the lifespan of a plant); or as an increase in the root/shoot index (measured as the ratio between root mass and shoot mass in the period of active growth of root and shoot).

[0748] Early vigour was determined by counting the total number of pixels from aboveground plant parts discriminated from the background. This value was averaged for the pictures taken on the same time point from different angles and was converted to a physical surface value expressed in square mm by calibration. The results described below are for plants three weeks post-germination.

### Seed-Related Parameter Measurements

[0749] The mature primary panicles were harvested, counted, bagged, barcode-labelled and then dried for three days in an oven at 37° C. The panicles were then threshed and all the seeds were collected and counted. The filled husks were separated from the empty ones using an air-blowing device. The empty husks were discarded and the remaining fraction was counted again. The filled husks were weighed on an analytical balance. The number of filled seeds was determined by counting the number of filled husks that remained after the separation step. The total seed yield was measured by weighing all filled husks harvested from a plant. Total seed number per plant was measured by counting the number of husks harvested from a plant. Thousand Kernel Weight (TKW) is extrapolated from the number of filled seeds counted and their total weight. The Harvest Index (HI) in the present invention is defined as the ratio between the total seed yield and the above ground area (mm²), multiplied by a factor 10⁶. The total number of flowers per panicle as defined in the present invention is the ratio between the total number of seeds and the number of mature primary panicles. The seed fill rate as defined in the present invention is the proportion (expressed as a %) of the number of filled seeds over the total number of seeds (or florets).

### Examples 11

### Results of the Phenotypic Evaluation of the Transgenic Plants

### 11.1. Cofactor Required for Sp1 Activation (CRSP) Polypeptides

[0750] The results of the evaluation of transgenic rice plants grown under non-stress conditions expressing the nucleic acid sequence of SEQ ID NO: 1 is given below. The percentage overall is shown for yield parameters having p<0.05 from the F-test and above the 5% threshold.

| Parameter | Overall |
|---|---|
| totalwgseeds | 9.0% |
| fillrate | 5.7% |
| harvestindex | 7.5% |
| flowerperpan | 6.0% |

### 11.2. Myb-Related CAB Promoter-Binding (MCB) Polypeptides

[0751] The results of the evaluation of transgenic rice plants in the T1 and T2 generation and expressing a nucleic acid comprising the longest Open Reading Frame in SEQ ID NO: 44 under non-stress conditions are presented below. See previous Examples for details on the generations of the transgenic plants.

[0752] The results of the evaluation of the yield parameters shown below, in transgenic rice plants in T1 generation, under non-stress conditions are presented in Table E1. An increase of at least 5% was observed for vigour (early vigour; EmerVigor), harvest index (harvestindex), and plant height (HeightMax).

TABLE E1

| | % increase in transgenic |
|---|---|
| Parameter | compared to control plant |
| EmerVigor | 20.2 |
| harvestindex | 13.0 |
| HeightMax | 6.0 |

[0753] The results of the evaluation of the yield parameters shown below, in transgenic rice plants in T2 generation, under non-stress conditions are presented in Table E2. An increase of at least 5% was observed for and plant height (HeightMax). total seed weight (totalwgseeds), number of filled seeds (nrfilledseed), fill rate (fillrate), harvest index (harvestindex) and thousand-kernel weight (Table E2).

TABLE E2

| | % increase in transgenic |
|---|---|
| Parameter | compared to control plant |
| totalwgseeds | 15.9 |
| fillrate | 20.4 |
| harvestindex | 21.4 |
| nrfilledseed | 12.7 |

### 11.3. Sirtuin 2 or Silent Information Regulator 2 (SRT2) Polypeptides

[0754] The results of the evaluation of transgenic rice plants in the T2 generation and expressing a nucleic acid comprising the longest Open Reading Frame in SEQ ID NO: 198, cloned as detailed in previous examples under drought-stress conditions are presented hereunder. An increase of at least 5% was observed for a number of yield-related traits including green biomass (AreaMax), emergence vigour (EmerVigor), total seed weight (totalwgseeds), number of filled seeds (nrfilledseed), the number of filled seeds (nrfilledseed), number of flowers per panicle (flowerperpan), and the total number of seeds (nrtotalseed) (Table E3).

TABLE E3
Results evaluation under drought screen

| | % increase in transgenic plants |
|---|---|
| Parameter | relative to control plants |
| AreaMax | 6.7 |
| EmerVigor | 19.9 |
| totalwgseeds | 13.8 |
| nrfilledseed | 14.9 |
| flowerperpan | 7.7 |
| nrtotalseed | 9.6 |

[0755] The results of the evaluation of the root system of the transgenic rice plants in the T2 generation above described and expressing a nucleic acid comprising the longest Open Reading Frame in SEQ ID NO: 198, cloned as detailed in previous examples under non-stress conditions are presented hereunder (Table E4). The root system was imaged as described above. The roots could be classified in two categories according to their diameter, thick and the thing root group. An increase in the proportion of thick roots in comparison with the thin roots were observed in the transgenic plants compared to the control plants (See Table E4).

TABLE E4
Plants grown under non-stress conditions

| | % increase in transgenic plants |
|---|---|
| Parameter | relative to control plants |
| RootThickMax | 7.4 |

### 11.4. SPX-RING (SYG1, Pho81, XPR1-Zinc Finger, RING-Type) Polypeptides

[0756] The results of the evaluation of transgenic rice plants in the T1 generation and expressing a nucleic acid comprising the longest Open Reading Frame in SEC) ID NO: 270 under non-stress conditions are presented below. See previous Examples for details on the generations of the transgenic plants.

[0757] The results of the evaluation of transgenic rice plants under the drought screen (previous Example) are presented below. An increase of at least 5% was observed for total seed yield (totalwgseeds), number of filled seeds (nrfilledseed), fill rate (fillrate), number of flowers per panicle, harvest index (harvestindex). The results for the best two events in this experiment are shown in Table E5.

TABLE E5
Percentage increase in the transgenic in
comparison to the control plants.

| Yield-trait | Event 9A | Event 21A | Average |
|---|---|---|---|
| totalwgseeds | 42 | 33 | 37.5 |
| fillrate | 48 | 38 | 43 |
| harvestindex | 33 | 28 | 30.5 |
| nrfilledseed | 40 | 35 | 37.5 |

1.-133. (canceled)

134. A method for enhancing a yield-related trait and/or abiotic stress tolerance in a plant relative to a corresponding control plant, comprising modulating expression in a plant cell, plant, or part thereof a nucleic acid selected from the group consisting of:
(a) a nucleic acid encoding a CRSP33-like polypeptide comprising one or more of the following motifs:
(i) Motif I: YPPPPPFYRLYK (SEQ ID NO: 35) or a motif having at least 90% sequence identity to Motif I;
(ii) Motif II: QGVRQLYPKGP (SEQ ID NO: 36) or a motif having at least 90% sequence identity to Motif II;
(iii) Motif III: LNRELQLHILELADVLVERPSQYARRVE (SEQ ID NO: 37) or a motif having at least 90% sequence identity to Motif III; and
(iv) Motif IV: IFKNLHHLLNSLRPHQARAT (SEQ ID NO: 38) or a motif having at least 90% sequence identity to Motif IV;
(b) a nucleic acid encoding an MCB polypeptide;
(c) a nucleic acid encoding an SRT2 polypeptide;
(d) a nucleic acid encoding a YRP2 polypeptide or an orthologue or paralogue thereof;
(e) a nucleic acid encoding a YRP3 polypeptide or an orthologue or paralogue thereof;
(f) a nucleic acid encoding a YRP4 polypeptide or an orthologue or paralogue thereof; and
(g) a nucleic acid encoding an SPX-RING polypeptide.

135. The method of claim 134, wherein the modulated expression is effected by introducing and expressing the nucleic acid in a plant or plant cell.

136. The method of claim 134, wherein
(a) the nucleic acid encoding a CRSP33-like polypeptide comprises
(i) a polynucleotide encoding any one of the proteins listed in Table A1, a portion of said polynucleotide, or a nucleic acid capable of hybridising with said polynucleotide;
(ii) a polynucleotide encoding a polypeptide having at least 90% sequence identity to SEQ ID NO: 4; or
(iii) a polynucleotide encoding an orthologue or paralogue of any of the proteins given in Table A1;
(b) the nucleic acid encoding an MCB polypeptide comprises
(i) a polynucleotide encoding an MCB polypeptide comprising one or more motifs having at least 50% sequence identity to any one or more of the following motifs:
Motif 1:
(SEQ ID NO: 188)
WTEEEH[RK][KT]FL[AED]GL[ERK][QK]LGKGDWRGI[SA]K[NG]
ASHAQKYFLRQTN;
Motif 2:
(SEQ ID NO: 189)
P[GN][KM]KKRR[AS]SLFD[VM][GM][IPA][ARP][DEA][LGY]
[SHK][PD][ANTY];
Motif 3:
(SEQ ID NO: 190)
[GLA][AGS][LST][GMP]Q[QSL][KS][RG][RK]RR[KR]AQ[ED]
RKK[GA][IV]P;
Motif 4:
(SEQ ID NO: 191)
WTEEEHR[ML]FLLGLQKLGKGDWRGI[SA]RN[YF]V[VIT][ST]
RTPTQVASHAQKYFIRQ[ST]N;
Motif 5:
(SEQ ID NO: 192)
[RK]RKRRSSLFD[MI]V[AP]D[ED];
Motif 6:
(SEQ ID NO: 193)
RRCSHC[SG][HN]NGHNSRT;
and
Motif 7:
(SEQ ID NO: 194)
SHAQKYF,
wherein amino acids between brackets represent alternative amino acids at the position;
(ii) a polynucleotide encoding any one of the proteins listed in Table A2, a portion of said polynucleotide, or a nucleic acid capable of hybridising with said polynucleotide; or
(iii) a polynucleotide encoding an orthologue or paralogue of any of the proteins given in Table A2;
(c) the nucleic acid encoding an SRT2 polypeptide comprises
(i) a polynucleotide encoding an amino acid domain having at least 50% overall sequence identity to any one or more of the amino acid domains set forth in Table C1;
(ii) a polynucleotide encoding any one of the proteins listed in Table A3, a portion of said polynucleotide, or a nucleic acid capable of hybridising with said polynucleotide; or
(iii) a polynucleotide encoding an orthologue or paralogue of any of the proteins set forth in Table A3;
(d) the nucleic acid encoding a YRP2 polypeptide or an orthologue or paralogue thereof comprises
(i) a polynucleotide encoding any one of the proteins listed in Table A4, a portion of said polynucleotide, or a nucleic acid capable of hybridising with said polynucleotide; or
(ii) a polynucleotide encoding an orthologue or paralogue of any of the proteins given in Table A4;
(e) the nucleic acid encoding a YRP3 polypeptide or an orthologue or paralogue thereof comprises;
(i) a polynucleotide encoding any one of the proteins listed in Table A5, a portion of said polynucleotide, or a nucleic acid capable of hybridising with said polynucleotide; or
(ii) a polynucleotide encoding an orthologue or paralogue of any of the proteins given in Table A5;
(f) the nucleic acid encoding a YRP4 polypeptide or an orthologue or paralogue thereof comprises
(i) a polynucleotide encoding any one of the proteins listed in Table A6, a portion of said polynucleotide, or a nucleic acid capable of hybridising with said polynucleotide; or
(ii) a polynucleotide encoding an orthologue or paralogue of any of the proteins given in Table A6; or
(g) the nucleic acid encoding an SPX-RING polypeptide comprises
(i) a polynucleotide encoding a motif having at least 50% overall sequence identity to any one or more of:
Motifs 1-1 to Motifs 1-35 (SEQ ID NO: 340 to 374);
Motifs 2-1 to Motifs 2-35 (SEQ ID NO: 375 to 409); and
Motifs 3-1 to Motifs 3-35 (SEQ ID NO: 410 to 444);
(ii) a polynucleotide encoding any one of the proteins listed in Table A7, a portion of said polynucleotide, or a nucleic acid capable of hybridising with said polynucleotide; or
(iii) a polynucleotide encoding an orthologue or paralogue of any of the proteins given in Table A7.

137. The method of claim 134, wherein the enhanced yield-related trait is increased yield, increased seed yield, and/or increased biomass relative to a corresponding control plant.

138. The method of claim 134, wherein the enhanced yield-related trait is obtained under non-stress conditions.

139. The method of claim 134, wherein the nucleic acid is operably linked to a constitutive promoter, a GOS2 promoter, or a GOS2 promoter from rice.

140. The method of claim 134, wherein
(a) the nucleic acid encoding a CRSP33-like polypeptide is of plant origin, from a dicotyledonous plant, from the family Solanaceae, or from Lycopersicum esculentum;
(b) the nucleic acid encoding an MCB polypeptide is of plant origin, from a dicotyledonous plant, from the family Brassicaceae, from the genus Arabidopsis, or from Arabidopsis thaliana;
(c) the nucleic acid encoding a SRT2 polypeptide is of plant origin, from a dicotyledonous plant, from the family Brassicaceae, from the genus Arabidopsis, or from Arabidopsis thaliana;
(d) the nucleic acid encoding a YRP2 polypeptide is from Solanum lycopersicon;
(e) the nucleic acid encoding a YRP3 polypeptide is from Physcomitrella patens;
(f) the nucleic acid encoding a YRP4 polypeptide is from Triticum aestivum; or
(g) the nucleic acid encoding an SPX-RING polypeptide is of plant origin, from a dicotyledonous plant, from the family Brassicaceae, from the genus Arabidopsis, or from Arabidopsis thaliana.

141. The method of claim 134, wherein expression of the nucleic acid is increased.

142. A method for producing seeds comprising
(a) obtaining the plant produced by the method of claim 134; and
(b) harvesting seeds from said plant.

143. A construct comprising:
(i) a nucleic acid;
(ii) one or more control sequences capable of driving expression of said nucleic acid; and optionally
(iii) a transcription termination sequence,
wherein said nucleic acid is selected from the group consisting of:
(a) a nucleic acid encoding a CRSP33-like polypeptide comprising one or more of the following motifs:
(i) Motif I: YPPPPPFYRLYK (SEQ ID NO: 35) or a motif having at least 90% sequence identity to Motif I;
(ii) Motif II: QGVRQLYPKGP (SEQ ID NO: 36) or a motif having at least 90% sequence identity to Motif II;
(iii) Motif III: LNRELQLHILELADVLVERPSQYARRVE (SEQ ID NO: 37) or a motif having at least 90% sequence identity to Motif III; and
(iv) Motif IV: IFKNLHHLLNSLRPHQARAT (SEQ ID NO: 38) or a motif having at least 90% sequence identity to Motif IV;
(b) a nucleic acid encoding an MCB polypeptide;
(c) a nucleic acid encoding an MCB polypeptide which comprises one or more motifs having at least 50% sequence identity to any one or more of the following motifs:
(i) Motif 1:
(SEQ ID NO: 188)
WTEEEH[RK][KT]FL[AED]GL[ERK][QK]LGKGDWRGI[SA]K[NG]
ASHAQKYFLRQTN;
(ii) Motif 2:
(SEQ ID NO: 189)
P[GN][KM]KKRR[AS]SLFD[VM][GM][IPA][ARP][DEA][LGY]
[SHK][PD][ANTY];
(iii) Motif 3:
(SEQ ID NO: 190)
[GLA][AGS][LST][GMP]Q[QSL][KS][RG][RK]RR[KR]AQ[ED]
RKK[GA][IV]P;
(iv) Motif 4:
(SEQ ID NO: 191)
WTEEEHR[ML]FLLGLQKLGKGDWRGI[SA]RN[YF]V[VIT][ST]
RTPTQVASHAQKYFIRQ[ST]N;
(v) Motif 5:
(SEQ ID NO: 192)
[RK]RKRRSSLFD[MI]V[AP]D[ED];
(vi) Motif 6:
(SEQ ID NO: 193)
RRCSHC[SG][HN]NGHNSRT;
and
(vii) Motif 7:
(SEQ ID NO: 194)
SHAQKYF,
wherein amino acids between brackets represent alternative amino acids at the position;
(d) a nucleic acid encoding an SRT2 polypeptide;
(e) a nucleic acid encoding an SRT2 polypeptide comprising a protein domain having at least 50% overall sequence identity to any one or more of the amino acid domains set forth in Table C1;
(f) a nucleic acid encoding a YRP2 polypeptide or an orthologue or paralogue thereof;
(g) a nucleic acid encoding a YRP2 polypeptide or an orthologue or paralogue thereof, wherein the nucleic acid encodes any one of the proteins listed in Table A4, or is a portion of such a nucleic acid, or a nucleic acid capable of hybridising with such a nucleic acid;
(h) a nucleic acid encoding a YRP3 polypeptide or an orthologue or paralogue thereof;
(i) a nucleic acid encoding a YRP3 polypeptide or an orthologue or paralogue thereof wherein the nucleic acid encodes any one of the proteins listed in Table A5 or is a portion of such a nucleic acid, or a nucleic acid capable of hybridising with such a nucleic acid;
(j) a nucleic acid encoding a YRP4 polypeptide or an orthologue or paralogue thereof;
(k) a nucleic acid encoding a YRP4 polypeptide or an orthologue or paralogue thereof wherein the nucleic acid encodes any one of the proteins listed in Table A6 or is a portion of such a nucleic acid, or a nucleic acid capable of hybridising with such a nucleic acid;
(l) a nucleic acid encoding an SPX-RING polypeptide; and
(m) a nucleic acid encoding an SPX-RING polypeptide comprising a motif having at least 50% overall sequence identity to any one or more of:
(i) Motifs 1-1 to Motifs 1-35 (SEQ ID NO: 340 to 374);
(ii) Motifs 2-1 to Motifs 2-35 (SEQ ID NO: 375 to 409); and
(iii) Motifs 3-1 to Motifs 3-35 (SEQ ID NO: 410 to 444).

144. The construct of claim 143, wherein one of the control sequences is a constitutive promoter, a GOS2 promoter, or a GOS2 promoter from rice.

145. A plant, plant part, or plant cell transformed with the construct of claim 143.

146. A plant, plant part, or plant cell obtained by the method of claim 134, wherein the plant, plant part, or plant cell comprises the nucleic acid.

147. A transgenic plant having increased yield and/or increased abiotic stress tolerance relative to a corresponding control plant, or a transgenic plant cell derived from said transgenic plant, wherein the increased yield and/or abiotic stress tolerance results from modulated expression of a nucleic acid selected from the group consisting of
(a) a nucleic acid encoding a CRSP33-like polypeptide comprising one or more of the following motifs:
(i) Motif I: YPPPPPFYRLYK (SEQ ID NO: 35) or a motif having at least 90% sequence identity to Motif I;
(ii) Motif II: QGVRQLYPKGP (SEQ ID NO: 36) or a motif having at least 90% sequence identity to Motif II;
(iii) Motif III: LNRELQLHILELADVLVERPSQYARRVE (SEQ ID NO: 37) or a motif having at least 90% sequence identity to Motif III; and
(iv) Motif IV: IFKNLHHLLNSLRPHQARAT (SEQ ID NO: 38) or a motif having at least 90% sequence identity to Motif IV;
(b) a nucleic acid encoding an MCB polypeptide;
(c) a nucleic acid encoding an MCB polypeptide which comprises one or more motifs having at least 50% sequence identity to any one or more of the following motifs:
(i) Motif 1:
(SEQ ID NO: 188)
WTEEEH[RK][KT]FL[AED]GL[ERK][QK]LGKGDWRGI[SA]K[NG]
ASHAQKYFLRQTN;
(ii) Motif 2:
(SEQ ID NO: 189)
P[GN][KM]KKRR[AS]SLFD[VM][GM][IPA][ARP][DEA][LGY]
[SHK][PD][ANTY];
(iii) Motif 3:
(SEQ ID NO: 190)
[GLA][AGS][LST][GMP]Q[QSL][KS][RG][RK]RR[KR]AQ[ED]
RKK[GA][IV]P;
(iv) Motif 4:
(SEQ ID NO: 191)
WTEEEHR[ML]FLLGLQKLGKGDWRGI[SA]RN[YF]V[VIT][ST]
RTPTQVASHAQKYFIRQ[ST]N;
(v) Motif 5:
(SEQ ID NO: 192)
[RK]RKRRSSLFD[MI]V[AP]D[ED];
(vi) Motif 6:
(SEQ ID NO: 193)
RRCSHC[SG][HN]NGHNSRT;
and
(vii) Motif 7:
(SEQ ID NO: 194)
SHAQKYF,
wherein amino acids between brackets represent alternative amino acids at the position;
(d) a nucleic acid encoding an SRT2 polypeptide;
(e) a nucleic acid encoding an SRT2 polypeptide comprising a protein domain having at least 50% overall sequence identity to any one or more of the amino acid domains set forth in Table C1;
(f) a nucleic acid encoding a YRP2 polypeptide;
(g) a nucleic acid encoding a YRP3 polypeptide;
(h) a nucleic acid encoding a YRP4 polypeptide;
(i) a nucleic acid encoding an SPX-RING polypeptide; and
(j) a nucleic acid encoding an SPX-RING polypeptide comprising a motif having at least 50% overall sequence identity to any one or more of:
(i) Motifs 1-1 to Motifs 1-35 (SEQ ID NO: 340 to 374);
(ii) Motifs 2-1 to Motifs 2-35 (SEQ ID NO: 375 to 409); and
(iii) Motifs 3-1 to Motifs 3-35 (SEQ ID NO: 410 to 444).

148. The method of claim 135, further comprising cultivating the plant or plant cell under conditions promoting plant growth and development and/or under abiotic stress conditions.

149. The plant of claim 145, or a transgenic plant cell derived from the plant, wherein the plant is a crop plant, a monocot, a cereal, rice, maize, wheat, barley, millet, rye, triticale, sorghum, emmer, spelt, secale, einkorn, teff, milo, or oats.

150. Harvestable parts of the plant of claim 149.

151. The harvestable parts of claim 150, wherein said harvestable parts are seeds.

152. Products derived from the plant of claim 149 and/or from harvestable parts of said plant.

153. A method for producing a transgenic plant with enhanced abiotic stress tolerance and/or an enhanced yield-related trait relative to a corresponding control plant, comprising transforming a plant with the construct of claim 143.

The application's sequence listing, which the Patent Office published only in electronic form, follows.

SEQUENCE LISTING (447 sequences)

SEQ ID NO: 1 - DNA, 653 bp, Solanum lycorpersicum
ctcgacactgccttttggctcattttaatgtaactattattgtgacagagaagataagaacattgtttttgtgaaatcacatgtcgacagcaacatacccaccaccccctccgttttataggctgtacaaggactatcttcaagaccccaagtctgctccggaacctccccctccaattgagggcacctatgtcctctttggtagcaactacactactgatgatgtactcccaaatttggaagagcagggtgtgcgtcagttatacccaaaagggcctaatgttgatttcaagaaagaactaagagcacttaacagagaattgcagctacatatattggagcttgctgatgttcttgtagagcgcccttcgcaatatgccaggagagtggaagagatatctctgatattcaagaacttgcaccacctactcaattctctgcgtcctcaccaggctcgagccacacttatccacattctagaacttcagatacaacgacgtaaacaagcaatagaggatatcaagcggagaagggaagaagctcagaagcttctaaaggaggcacttggtacccttgagggacagtagaatgctctttagactttacacacacagctggcagaattagtgtctagaatgctttgaaattacagt

SEQ ID NO: 2 - protein, 168 aa, Solanum lycopersicum Le
MSTATYPPPPPFYRLYKDYLQDPKSAPEPPPPIEGTYVLFGSNYTTDDVLPNLEEQGVRQLYPKGPNVDFKKELRALNRELQLHILELADVLVERPSQYARRVEEISLIFKNLHHLLNSLRPHQARATLIHILELQIQRRKQAIEDIKRRREEAQKLLKEALGTLEGQ

SEQ ID NO: 3 - DNA, 714 bp, Oryza sativa
aggttcgccttcggcttcgggtcggttcggtcgctcgtctccgtctccgtctccgccaccgccaccgccgccgccgctcgccggaggctctcgcgcccttcctcgagcttggaagttgagttggttccgtacctggcatggccacatcatcagcatatcctccacctcctccatattaccgactatacaaggattacgaaaaggatccttcatctgcacctgaacctccaccgccagttgatggaccatatcaactcttcggtgctacctacacaacagatgtggtgctcccaagcttagaggatcaaggtgttcgtcagctttatccgaagagcccagatatcgatttcaaaaaggagctaaggaccctgaacagagagcttcagctccatattttggagctagcagatattttagtggaaagaccatcacagtatgctcgtagggtagaggatatttcactcattttcaagaacttgcaccaccttcttaattccttacgacctcaccaagccagagccactctgattcacatgcttgagaaccaaattcagcgtcggaaacaagcaattgaagatataaagcagaggagagaggaggcacaaaagctacttggggaatcactgctaatcttagatggaaaccagccgagtttgcctgcaatgtgaagacatgtgatgtatctgcttccctgcttcctaacgtgccaagttg

SEQ ID NO: 4 - protein, 176 aa, Oryza sativa
MATSSAYPPPPPYYRLYKDYEKDPSSAPEPPPPVDGPYQLFGATYTTDVVLPSLEDQGVRQLYPKSPDIDFKKELRTLNRELQLHILELADILVERPSQYARRVEDISLIFKNLHHLLNSLRPHQARATLIHMLENQIQRRKQAIEDIKQRREEAQKLLGESLLILDGNQPSLPAM

SEQ ID NO: 5 - DNA, 905 bp, Arabidopsis thaliana
agcaaatccctcaacggctctagaaatacgttttaagcttcacgaggaataagaagattaggaatatatgggcttaaagcaggcctgaactaaattaaaggcccaactaaaagagaggaaacaaatctcgatttgctttctctggtgagcgtgtcttcttccgatcgtcttctccggctgcgtgaattctccgccgagccatctctctggcgaatctccatttttgatttggatatgtagagaataatggctacagctacatatccacctcctcctccatattacagactctacaaggatttctcagaaaacactgattctgctcctgaacctcctcctccgattgaaggcacctacgtctgttttggaggcaactatactactgaagatgttcttccaagcttagaagaacaaggagtgcctcaactttatccaaaagattctaatcttgattacaagaaggaactcaggtcactgaatagagaactacagttacatatattggagcttgctgatgttcttgttgacagaccttctcaatatgcgaagagaattggtgaaatttcttcaatcttcaagaacttgcatcaccttctcaattccttgaggcctcaccaagcgagagcaacgcttattcacattatggaacttcaaattcaacagaggaaacaagctgtggaagacattaagaggaggagagaagaagcacaaggacttcttaaggatgctttcgtcactttagatggtcaataaagtatactttttgttaatcccattttgtgtaaattagcgctaataacctatgccctcgaaactttttttaattgatcctgtgtgtgtgagagagagagacagacgtgtgcaatctcatgattcaacaagtaaagcctatatcatctttattc

SEQ ID NO: 6 - DNA, 885 bp, Arabidopsis thaliana
agcaaatccctcaacggctctagaaatacgttttaagcttcacgaggaataagaagattaggaatatatgggcttaaagcaggcctgaactaaattaaaggcccaactaaaagagaggaaacaaatctcgatttgctttctctggtgagcgtgtcttcttccgatcgtcttctccggctgcgtgaattctccgccgagccatctctctggcgaatctccaagaataatggctacagctacatatccacctcctcctccatattacagactctacaaggatttctcagaaaacactgattctgctcctgaacctcctcctccgattgaaggcacctacgtctgttttggaggcaactatactactgaagatgttcttccaagcttagaagaacaaggagtgcctcaactttatccaaaagattctaatcttgattacaagaaggaactcaggtcactgaatagagaactacagttacatatattggagcttgctgatgttcttgttgacagaccttctcaatatgcgaagagaattggtgaaatttcttcaatcttcaagaacttgcatcaccttctcaattccttgaggcctcaccaagcgagagcaacgcttattcacattatggaacttcaaattcaacagaggaaacaagctgtggaagacattaagaggaggagagaagaagcacaaggacttcttaaggatgctttcgtcactttagatggtcaataaagtatactttttgttaatcccattttgtgtaaattagcgctaataacctatgccctcgaaactttttttaattgatcctgtgtgtgtgagagagagagacagacgtgtgcaatctcatgattcaacaagtaaagcctatatcatctttattc

SEQ ID NO: 7 - DNA, 736 bp, Arabidopsis thaliana
ctcttgctctacgccgtcttctccaaagcaaaatcaaaagcttcttcgatcttattctcgtctggttataatttccgattctgcattcccaatagggaataatggctacagctacgtatccgcctcctccaccatattacagactctacaaggattactcagaaaaccctaattctgctcctgaacctcctcctccgattgaaggcacctacgtctgttttggaggcaactatactactgaagatgttcttccaagcttagaagaacaaggagtgcctcaactttatcccaaagattctaatcttgattacaagaatgaactcaggtcactgaatagagaactacagttacatatattggagcttgctgatgttcttgttgacagaccttctcaatatgcgaagaggattggtgaaatttcttctatcttcaagaatttgcatcaccttctcaattccttgaggcctcaccaagcgagagcaacgcttattcacattatggaacttcaaattcaacagaggaaacaagctgtggaagacattaaaagaagaagagaagaagcacagcgacttctaaaggatgcttacctcactttagatggtcaatagagtctttttttgtgtgtgtaaattagcaattaataatctgtctgttattgttattgaccttcgaagcttattataatttgttaacactaaaacaaagttaatttgacaatcaactaagactgaatagt

SEQ ID NO: 8 - DNA, 529 bp, Brassica napus
gcaatctgatttaaccgtccttcttcctcgctccttgccgtcgtcgcatcatctccgaagctcaaatcaagctccttccaccttcgatcttcctcgtttcccccaaaaaggagaatggctacagctacgtacccgccgccgcctccgtattacagactctacaaggattactctgaaaaccctagctccgctccccaacctccgcctccgatcgaaggaacctacgtttgtttcggtggcaattacactactgaggatgttcttccaagcttagaagagcaaggagtgcctcagctttatcccaaagactctaatgttgattacaagaaggaacttaggtctttgaatagggagcttcagttgcatatactggagcttgctgatgttctcgttgagaggccttctcagtacgctaagaggattggtgatatatcgtcgatctttaagaatttgcatcaccttctcaattcattgaggcctcaccaggcgagagcaacgcttattcacattatggagcttcagattcaac

SEQ ID NO: 9 - DNA, 1052 bp, Glycine max
  misc_feature (988)..(988): n is a, c, g, or t
ttgacacaggaggcacgttgctatgagttgctctttctcaattttgcaattgcaagtgaagaagccctaattttttgcagatctggaaatggcgacggcaacataccctccaccgccaccttattacaggctttacaaagattacttgcaagaccctaattctgctcccgaccctccaccacctattgaaggcacttatctttgttttggagccaattacactactagtgatgttctacctaccttggaagaacaaggggtgcgccagctctattctaagggccctaatgttgatttcaagaaagagctgaggtcactcaacggagagttgcaactacatgttttggagcttgctgatattcttattgagaggccttcacagtatgcaagaagagtagaagaaatttcaactgtattcaaaaacttacatcaccttttaaattcattgcgtcctcatcaggcgagagcaacattgattcatattttggaacttcagatacagcgtcgtaaacaagcagtggaagacataaagaagaggagagaagaagcccgaaggctccttaacgagtccttggcaacacttgatggccattagagcattctctatcttgtattcacagcaagaatctaccgaggaaattaattttatttgaaaagtgaattttgtcctctagattttagcaaatgaaaagattaaaacaagaagttgtgcgacttccttgaaaatggtcacttgacataactgtctcatgttcttgatgaaggctgttttgcagcatgtgcaaagatattagaaatagaagaattgtgttaagagtgttgctactgttcttagaaatatttttagtagtgtataaagtctgaagtctgaactattaatggatggacctgtcagtctgcattattattattaaaaaaaaaaaaaaaaaacctaatttacagtagctgctttgtttatgtaatacataacaataaaaataagcagctntgtctatgtcatatatgtaaaataaattaataataaaatttctattagtacctaaaaaaaaaaa

SEQ ID NO: 10 - DNA, 1027 bp, Hordeum vulgare
cggcacgagggtcgcctcccgcatcggcctctcgtctcgtctcccgtctccgcccgctcgccgccggcggccctccgcccccgtggtcgttcctctagaagagtaaggcgagatggcgatggcgacatcgtcggcgtaccctccgcctcctccgttctaccggctgtacaaggacttcgagcaggacccctcgtctgcgccggagcctccgccgccgatcgagggatcgtaccagctatttggtgctacctacacaacggatgtggtgctgccaagcctggaggatcaaggtgttcgccagctttatcccaagggcccagatatcgacttcaagaaggagctaagaacactcaacagagagcttcaactccatatcttggagttagcggatattttagtggagaggccatctcagtatgctcgtagggttgaagacatttcactcattttcaagaacttacaccatcttcttaattccctacgaccacaccaggcaagagcaacattgatccacctccttgagagccagatacagcgtcgtaagcaagcaattgaggatataaaacagaggagagaggaggcacaaaggctacttggggaatcgctggttattattgagggaagccagcagcaggttatgactccaatgtgaaggcctctcatatcctgggtttcaggttatgtctaatatgaaggcctctcatatcctgggtttcctggtgccaagttgactggattaagatgaagtattggcgttttaggtggtgaatgcatttcacaatttgctcgtagaaatagcctagtgacagttatgagaaatttctagctttcgaagatataattatttatctatgtgatgtgaagattttaagcattgaacctgatcggctcgatgtttgatacttctgttgtaatgtttagaatctttccgggggttttcacattcccttccatgtttctatcgaaatgctgctgtagcatgctccaggcctccaaactggcagcatgtttaggagtcaatggatcc

SEQ ID NO: 11 - DNA, 621 bp, Hordeum vulgare
  misc_feature (608)..(608): n is a, c, g, or t
tcgcctcccgcatcggcctctcgtctcgtctcccgtctccgcccgctcgccgccgccgcacgaccggctctcgcgacaggccctccgcccccgtggtcgttcctctagaagagtaaggcgagatggcgatggcgacatcgtcggcataccctccgcctcctccgttctaccggctgtacaaggacttcgagcaggacccctcgtctgcgccggagcctccgccgccgatcgagggatcgtaccagctatttggtgctacctacacaacggatgtggtgctgccaagcctggaggatcaaggtgttcgccagctttatcccaagggcccagatatcgacttcaagaaggagctaagaacactcaacagagagcttcaactccatatcttggagttagcggatattttagtggagaggccatctcagtatgctcgcagggttgaagacatttcactcattttcaagaacttacaccatcttcttaattccctacgaccacaccaggcaagagcaacattgatccacctccttgagagccagatacagcgtcgtaagcaagcaattgaggatataaaacagaggagagaggaggcacaaaggctacttggngaatcgctgatta

SEQ ID NO: 12 - DNA, 844 bp, Medicago truncatula
cagtcctccctaatccgccttcacactaggcggaagcttgctggcgcatcactccaacggaagaccctccgacaaatcttgaagttgagatacatctatgatctttgaaggtttttgattagaaattttttgttatggcaacggcaacatacccaccaccaccaccttattacaggctttataaagattatgtgcaagaccctgagtctgctccagagcctccaccaccaattgaaggaacttatatctgtttcggaggcagttacactactagtgatgttctaccaagcttggaagaacaaggggtacgccaactctattctaaaggacctaatattgatttcaagaaggagctgaggtcacttaatggagaattgcaactacacattttggagcttgctgatattcttattgagagaccatcacaatatgcaaggagagtcgaagaaatttcaactgtgttcaaaaatttgcatcaccttttgaattcactgcgtcctcatcaggcaagagcaactttgattcacattttggaacttcagatagagcgccgtaaacaagctgtggaggacataaataggaggagagaagaagctcgaagaatccttaacgagtcattggcaacacttgatggccattaaagcatagttagttatggtcaataaacaaagacaatcatggcaaccttaagggaaaattgcactaacctcgtttaaggtttcactaaataacaaagacaccccctctaattttaaattaagcacctttatgggtaggtggtggtaataaacaaacacaaacgatgttttttatggttttggggtttctaccttatacaaatttg

SEQ ID NO: 13 - DNA, 846 bp, Medicago truncatula
cggccggggaggattggcagggatacgatacttcatccattttaaagtatccgagattcagagcagagcagcatgacaaatagagagaaagagaaacaaagagaaagggtgggtagtcactagtcatcagttcccagctctctcgatctcagtcactcacctcaatcaccgccttcacactaggcggaagcttgctggcgcatcactccgacggaagaccctccgacaaatcttgaagttgagatacatctatgatctttgaaggtttttgattagaaattttttgttatggcaacggcaacatacccaccaccaccaccttattacaggctttataaagattatgtgcaagaccctgagtctgctccagagcctccaccaccaattgaaggaacttatatctgtttcggaggcagttacactactagtgatgttctaccaagcttggaagaacaaggggtacgccaactctattctaaaggacctaatattgatttcaagaaggagctgaggtcacttaatggagaattgcaactacacattttggagcttgctgatattcttattgagagaccatcacaatatgcaaggagagtcgaagaaatttcaactgtgttcaaaaatttgcatcaccttttgaattcactgcgtcctcatcaggcaagagcaactttgattcacattttggaacttcagatagagcgccgtaaacaagctgcggaggacataaataggaggagagaagaagctcgaagaatccttaacgagtcattggcaacacttgatggccaataaagcatagttagttatggtcaataaacaaagacaatcatggcaaccttaaag

SEQ ID NO: 14 - DNA, 531 bp, Oryza sativa
atggccacatcatcagcatatcctccacctcctccatattaccgactatacaaggattacgaaaaggatccttcatctgcacctgaacctccaccgccagttgatggaccatatcaactcttcggtgctacctacacaacagatgtggtgctcccaagcttagaggatcaaggtgttcgtcagctttatccgaagagcccagatatcgatttcaaaaaggagctaaggaccctgaacagagagcttcagctccatattttggagctagcagatattttagtggaaagaccatcacagtatgctcgtagggtagaggatatttcactcattttcaagaacttgcaccaccttcttaattccttacgacctcaccaagccagagccactctgattcacatgcttgagaaccaaattcagcgtcggaaacaagcaattgaagatataaagcagaggagagaggaggcacaaaagctacttggggaatcactgctaatcttagatggaaaccagccgagtttgcctgcaatgtga

SEQ ID NO: 15 - DNA, 972 bp, Oryza sativa
gggtcggttcggtcgctcgtctccgtctccgtctccgccaccgccaccgccgccgccgctcgccggaggctctcgcgcccttcctcgagattctgtgatgtgacagcttggaagttgagttggttccgtacctggcatggccacatcatcagcatatcctccacctcctccatattaccgactatacaaggattacgaaaaggatccttcatctgcacctgaacctccaccgccagttgatggaccatatcaactcttcggtgctacctacacaacagatgtggtgctcccaagcttagaggatcaaggtgttcgtcagctttatccgaagagcccagatatcgatttcaaaaaggagctaaggaccctgaacagagagcttcagctccatattttggagctagcagatattttagtggaaagaccatcacagtatgctcgtagggtagaggatatttcactcattttcaagaacttgcaccaccttcttaattccttacgacctcaccaagccagagccactctgattcacatgcttgagaaccaaattcagcgtcggaaacaagcaattgaagatataaagcagaggagagaggaggcacaaaagctacttggggaatcactgctaatcttagatggaaaccagccgagtttgcctgcaatgtgaagacatgtgatgtatctgcttccctgcttcctaacgtgccaagttggctagctagagagtgcacttggcagttcacctgtagaaatagtctagtgagtagtgtgaccgtgggagatacttctggcttttgtgcaaactccttatttattgcctgtttgtgtgttgtgatttgtgaaactttaaacatgaacctatcctggactgacggtagaaaagcttcaatgttctcctgtaagcatacagtttcatgatgtttagaacctatagttctgtttaattgcttgacagttccattattatttttt

SEQ ID NO: 16 - DNA, 672 bp, Physcomitrella patens
ggcgaagtgctgcatttgtgctgtggaacgtgaatttgtggtcaggatcgggggtcggagcgatcattgagggccaatgtctgcatctgcatttccccctcctccaccgtattacaagttgtacgcggagtacagcgatgacccgagctcggctccacctccgcctcctcctgttgtcggtacttatgtccagtatggtgcgaattacacgactacagacattcttcctggattagaagaggagggtttacgacaactctatccaactggttctgacgttgattacaagaaggagctgcgggctctgaatagagaacttattctccagttcttggagctgatcgacgcattaatagaaagaccttcacagtcagcccgttgtgttgaagatatcaccctaatattgcgaaatgttcatcacttgttgaattctcttcgtccacaccaggcaagagcaaccgtgatacatatgctggaggcacaattaattaggcggaaggaggccctcgcaaagattcgcagaaagagagcagaggctcgagcaatgcttcaagagttttcagtcactctgtagatcatgctagattgctttggctcaagtttagaagttcctgtggacggatcttgtataaacaacaatttttgaatgtgtataaagctagctctttcttg

SEQ ID NO: 17 - DNA, 617 bp, Populus trichocarpa
ctttttggttgaaaagagtagagttctgcaatggcaacagctacatttccaccaccgccaccgttttacagactgtacaaagattatattgaaaaccctaaatcagctccagaacctcctcctcctattgaaggcacttatgtgtgttttgctagcagttacactactgatgatgtgcttccaagcttagaagagcagggagtgcgacaactgtacccaaaaggaccaaatgttgatttcaagaaagaactgaggtcacttaatagagaattgcagcttcacattttggagcttgccgatgttcttgttgagagaccttcacaatatgctaggagagtggaagacatttcccttatcttcaagaatttgcatcaccttctcaattctttgcgtccccatcaggctagggccacattgatacatattctagagcttcagatacaacgtcgtaaacaagctgtggaggatataaagaggcagagagaagaggcgcagaaactcctcaaggaggctctcggaaccctagctgggcagtagagcatggattttagggttcatgtgctgcccaccctgttagttgggtcgccctgctcgtggaagttttccaaaaggctcgt

SEQ ID NO: 18 - DNA, 894 bp, Solanum lycopersicum
tgacagtctctgccgtgtctactctgtcgccggttgccgccggttgtcgctgctcgcacgtcttctctttttcagctgatataagcccaaaattgcagcttatgtttggactaaactacaaattggctaaggtgctcccatcgacaatacactattggagagcgggtgcagaggtctgatatttctcgttcaagtgtcgactcaacgccgagagaagtcaccttttttggttgacaaaaacctcgaaactgccctttggctcatcttaatgtaactattattgggacagagaagataagaacattgtttttgtgaaatcacatgtcgacagcaacatacccaccaccgcctccgttttataggctgtacaaggactatcttcaagaccccaagtctgctccagaacctccccctccaattgagggcacctatgtcctctttggtagcaactacactactgatgatgtactcccaaatttggaagagcagggtgtgcgtcagttatacccaaaagggcctaatgttgatttcaagaaagaactaagagcacttaacagagaattgcagctacatatattggagcttgctgatgttcttgtagagcgcccttcacaatatgccaggagagtggaagagatatctctgatattcaagaacttgcaccacctactcaattctctgcgtcctcaccaggctcgagccacacttatccacattctagaacttcagatacaacgacgtaaacaagcaatagaggatatcaagcggagaagggaagaagctcagaagcttctaaaggaggcacttggtacccttgagggacagtagaatgctctttagactttacacacacagctggcagaattagtgtctagaatgctttgaaattacagt

SEQ ID NO: 19 - DNA, 1037 bp, Triticum aestivum
gatcgctcgtggacggttcagattgaaccttgtggatcctggcccaacaccaccgtcccaaccaaggtcagtcgcctcccgcatcggcctcgtctcgtcttccgtctccgcccgctcgcctccgcccgccgaccggcctcgccggcggccgtgcgtccccgtggtcgtccctcgagaagagtaaggcgagatggcaatggcgacgtcgtcggcgtaccctccgcctcctccgttctaccggctgtacaaggacttcgagcaggacccctcgtctgcgccggagcctccaccgccgatcgaggggtcgtaccagctcttcggcgccacctacacaacagatgtggtgctgccaagtctggaggatcaaggtgttcgccagctttatcccaagggcccagatatcgacttcaagaaggagctaaggacactcaacagagagcttcaactccatatcttggagctagcggatattttagtggagaggccatctcagtatgcccgcagggttgaagacatttcacttattttcaagaacttgcaccatcttcttaattccctacgaccacaccaggcaagagcgacattgattcacctccttgagagccaaatacagcgccgtaagcaagcaattgaggatataaaacagaggagagaggaggcacaaaggctgcttggggaatcactggttattattgagggaagccagcagcaggttatgactccaatgtgaaggcctctaatatcctgggtttcaggttatgactccagtgtgaaggcctctgatatcctgggtttcctggtgccaagttggctggattaagatgaaagtattggcgtgaggtgaatgcattctgctgtttgctcgtagaaatagcctagtgataattatgagaaatttctagctttcaaagatgaattatgcatctgcgtgtgctgtgaagcttttaagcactgaacctggtcagctcgatgttggatacttccattgtaatgtttagaatcttttgttttcacttccatgttttcaaccggaacgc

SEQ ID NO: 20 - protein, 168 aa, Arabidopsis thaliana
MATATYPPPPPYYRLYKDFSENTDSAPEPPPPIEGTYVCFGGNYTTEDVLPSLEEQGVPQLYPKDSNLDYKKELRSLNRELQLHILELADVLVDRPSQYAKRIGEISSIFKNLHHLLNSLRPHQARATLIHIMELQIQQRKQAVEDIKRRREEAQGLLKDAFVTLDGQ

SEQ ID NO: 21 - protein, 168 aa, Arabidopsis thaliana; identical to SEQ ID NO: 20

SEQ ID NO: 22 - protein, 168 aa, Arabidopsis thaliana
MATATYPPPPPYYRLYKDYSENPNSAPEPPPPIEGTYVCFGGNYTTEDVLPSLEEQGVPQLYPKDSNLDYKNELRSLNRELQLHILELADVLVDRPSQYAKRIGEISSIFKNLHHLLNSLRPHQARATLIHIMELQIQQRKQAVEDIKRRREEAQRLLKDAYLTLDGQ

SEQ ID NO: 23 - protein, 139 aa, Brassica napus
  misc_feature (139)..(139): Xaa can be any naturally occurring amino acid
MATATYPPPPPYYRLYKDYSENPSSAPQPPPPIEGTYVCFGGNYTTEDVLPSLEEQGVPQLYPKDSNVDYKKELRSLNRELQLHILELADVLVERPSQYAKRIGDISSIFKNLHHLLNSLRPHQARATLIHIMELQIQX

SEQ ID NO: 24 - protein, 168 aa, Glycine max
MATATYPPPPPYYRLYKDYLQDPNSAPDPPPPIEGTYLCFGANYTTSDVLPTLEEQGVRQLYSKGPNVDFKKELRSLNGELQLHVLELADILIERPSQYARRVEEISTVFKNLHHLLNSLRPHQARATLIHILELQIQRRKQAVEDIKKRREEARRLLNESLATLDGH

SEQ ID NO: 25 - protein, 179 aa, Hordeum vulgare
MAMATSSAYPPPPPFYRLYKDFEQDPSSAPEPPPPIEGSYQLFGATYTTDVVLPSLEDQGVRQLYPKGPDIDFKKELRTLNRELQLHILELADILVERPSQYARRVEDISLIFKNLHHLLNSLRPHQARATLIHLLESQIQRRKQAIEDIKQRREEAQRLLGESLVIIEGSQQQVMTPM

SEQ ID NO: 26 - protein, 167 aa, Hordeum vulgare
  misc_feature (167)..(167): Xaa can be any naturally occurring amino acid
MAMATSSAYPPPPPFYRLYKDFEQDPSSAPEPPPPIEGSYQLFGATYTTDVVLPSLEDQGVRQLYPKGPDIDFKKELRTLNRELQLHILELADILVERPSQYARRVEDISLIFKNLHHLLNSLRPHQARATLIHLLESQIQRRKQAIEDIKQRREEAQRLLGESLIX

SEQ ID NO: 27 - protein, 168 aa, Medicago truncatula
MATATYPPPPPYYRLYKDYVQDPESAPEPPPPIEGTYICFGGSYTTSDVLPSLEEQGVRQLYSKGPNIDFKKELRSLNGELQLHILELADILIERPSQYARRVEEISTVFKNLHHLLNSLRPHQARATLIHILELQIERRKQAVEDINRRREEARRILNESLATLDGH

SEQ ID NO: 28 - protein, 168 aa, Medicago truncatula
MATATYPPPPPYYRLYKDYVQDPESAPEPPPPIEGTYICFGGSYTTSDVLPSLEEQGVRQLYSKGPNIDFKKELRSLNGELQLHILELADILIERPSQYARRVEEISTVFKNLHHLLNSLRPHQARATLIHILELQIERRKQAAEDINRRREEARRILNESLATLDGQ

SEQ ID NO: 29 - protein, 176 aa, Oryza sativa; identical to SEQ ID NO: 4

SEQ ID NO: 30 - protein, 176 aa, Oryza sativa; identical to SEQ ID NO: 4

SEQ ID NO: 31 - protein, 165 aa, Physcomitrella patens
MSASAFPPPPPYYKLYAEYSDDPSSAPPPPPPVVGTYVQYGANYTTTDILPGLEEEGLRQLYPTGSDVDYKKELRALNRELILQFLELIDALIERPSQSARCVEDITLILRNVHHLLNSLRPHQARATVIHMLEAQLIRRKEALAKIRRKRAEARAMLQEFSVTL

SEQ ID NO: 32 - protein, 168 aa, Populus trichocarpa
MATATFPPPPPFYRLYKDYIENPKSAPEPPPPIEGTYVCFASSYTTDDVLPSLEEQGVRQLYPKGPNVDFKKELRSLNRELQLHILELADVLVERPSQYARRVEDISLIFKNLHHLLNSLRPHQARATLIHILELQIQRRKQAVEDIKRQREEAQKLLKEALGTLAGQ

SEQ ID NO: 33 - protein, 168 aa, Solanum lycopersicum; identical to SEQ ID NO: 2

SEQ ID NO: 34 - protein, 179 aa, Triticum aestivum; identical to SEQ ID NO: 25

SEQ ID NO: 35 - protein, 12 aa, Artificial sequence
  motif 1
YPPPPPFYRLYK

SEQ ID NO: 36 - protein, 11 aa, Artificial sequence
  motif 2
QGVRQLYPKGP

SEQ ID NO: 37 - protein, 28 aa, Artificial sequence
  motif 3
LNRELQLHILELADVLVERPSQYARRVE

SEQ ID NO: 38 - protein, 20 aa, Artificial sequence
  motif 4
IFKNLHHLLNSLRPHQARAT

SEQ ID NO: 39 - DNA, 55 bp, Artificial sequence
  primer: prm09914
ggggacaagtttgtacaaaaaagcaggcttaaacaatgtcgacagcaacataccc

SEQ ID NO: 40 - DNA, 50 bp, Artificial sequence
  primer: prm09915
ggggaccactttgtacaagaaagctgggtgccagctgtgtgtgtaaagtc

SEQ ID NO: 41 - DNA, 56 bp, Artificial sequence
  primer: prm09858
ggggacaagtttgtacaaaaaagcaggcttaaacaatggccacatcatcagcatat

SEQ ID NO: 42 - DNA, 50 bp, Artificial sequence
  primer: prm09859
ggggaccactttgtacaagaaagctgggtaggaagcagggaagcagatac

SEQ ID NO: 43 - DNA, 2194 bp, Oryza sativa
aatccgaaaagtttctgcaccgttttcaccccctaactaacaatatagggaacgtgtgctaaatataaaatgagaccttatatatgtagcgctgataactagaactatgcaagaaaaactcatccacctactttagtggcaatcgggctaaataaaaaagagtcgctacactagtttcgttttccttagtaattaagtgggaaaatgaaatcattattgcttagaatatacgttcacatctctgtcatgaagttaaattattcgaggtagccataattgtcatcaaactcttcttgaataaaaaaatctttctagctgaactcaatgggtaaagagagagattttttttaaaaaaatagaatgaagatattctgaacgtattggcaaagatttaaacatataattatataattttatagtttgtgcattcgtcatatcgcacatcattaaggacatgtcttactccatcccaatttttatttagtaattaaagacaattgacttatttttattatttatcttttttcgattagatgcaaggtacttacgcacacactttgtgctcatgtgcatgtgtgagtgcacctcctcaatacacgttcaactagcaacacatctctaatatcactcgcctatttaatacatttaggtagcaatatctgaattcaagcactccaccatcaccagaccacttttaataatatctaaaatacaaaaaataattttacagaatagcatgaaaagtatgaaacgaactatttaggtttttcacatacaaaaaaaaaaagaattttgctcgtgcgcgagcgccaatctcccatattgggcacacaggcaacaacagagtggctgcccacagaacaacccacaaaaaacgatgatctaacggaggacagcaagtccgcaacaaccttttaacagcaggctttgcggccaggagagaggaggagaggcaaagaaaaccaagcatcctccttctcccatctataaattcctccccccttttcccctctctatataggaggcatccaagccaagaagagggagagcaccaaggacacgcgactagcagaagccgagcgaccgccttctcgatccatatcttccggtcgagttcttggtcgatctcttccctcctccacctcctcctcacagggtatgtgcctcccttcggttgttcttggatttattgttctaggttgtgtagtacgggcgttgatgttaggaaaggggatctgtatctgtgatgattcctgttcttggatttgggatagaggggttcttgatgttgcatgttatcggttcggtttgattagtagtatggttttcaatcgtctggagagctctatggaaatgaaatggtttagggatcggaatcttgcgattttgtgagtaccttttgtttgaggtaaaatcagagcaccggtgattttgcttggtgtaataaagtacggttgtttggtcctcgattctggtagtgatgcttctcgatttgacgaagctatcctttgtttattccctattgaacaaaaataatccaactttgaagacggtcccgttgatgagattgaatgattgattcttaagcctgtccaaaatttcgcagctggcttgtttagatacagtagtccccatcacgaaattcatggaaacagttataatcctcaggaacaggggattccctgttcttccgatttgctttagtcccagaattttttttcccaaatatcttaaaaagtcactttctggttcagttcaatgaattgattgctacaaataatgcttttatagcgttatcctagctgtagttcagttaataggtaatacccctatagtttagtcaggagaagaacttatccgatttctgatctccatttttaattatatgaaatgaactgtagcataagcagtattcatttggattattttttttattagctctcaccccttcattattctgagctgaaagtctggcatgaactgtcctcaattttgttttcaaattcacatcgattatctatgcattatcctcttgtatctacctgtagaagtttctttttggttattccttgactgcttgattacagaaagaaatttatgaagctgtaatcgggatagttatactgcttgttcttatgattcatttcctttgtgcagttcttggtgtagcttgccactttcaccagcaaagttc

SEQ ID NO: 44 - DNA, 804 bp, Triticum aestivum
atggaggaggagggcgcgaggaaggcggtgctcttcaggctgttcggcgtcgaggtccgcggcgcggaggaggatgatgacgcggagcccatggagctcaagaagagcaccagcatgcccaacctcgcctgcgcctccatcgtcccgattctcctgcccggcgaggccagcaacgacaagggctacgcctccgacgacggcgagctggcgtccacgccgcagctcaagcgccgccgccgcaaggcccaggagcgcaagaaagggattccatggaccgaggaggagcacaggaagttcctggagggtctgaagcagctgggcaagggggactggagaggcatctccaagaacttcgtcaccaccaggacggccacgcaggtggccagccacgcccagaagtacttcctccggcagaccaaccccggcaagaagaagcgccgggccagcctcttcgacgtcggcatccccgccggccacagctacgacgatcagctgccaagtactcagagtgttggaaccaagcttgctcctgctgagaagatactccacaccgaccgcggcgacgtgccgctaccaagttatcctggaggcatcaggggcaacagcaacaacatccagatgcaggttgaagaactaactgaccatgtgaagaagagatcaaagttccccaccgggacgtcgctggccgccatggctgcctccgggctggagctggcaatgtcttcatctgccagcagcatcctggagctcagcatcgcgcctcctcgctgctacggcgcggtcgacgccatcaaggtgctgtga

SEQ ID NO: 45 - protein, 267 aa, Triticum aestivum
MEEEGARKAVLFRLFGVEVRGAEEDDDAEPMELKKSTSMPNLACASIVPILLPGEASNDKGYASDDGELASTPQLKRRRRKAQERKKGIPWTEEEHRKFLEGLKQLGKGDWRGISKNFVTTRTATQVASHAQKYFLRQTNPGKKKRRASLFDVGIPAGHSYDDQLPSTQSVGTKLAPAEKILHTDRGDVPLPSYPGGIRGNSNNIQMQVEELTDHVKKRSKFPTGTSLAAMAASGLELAMSSSASSILELSIAPPRCYGAVDAIKVL

SEQ ID NO: 46 - DNA, 813 bp, Hordeum vulgare
atggaggaggagggcggcgcgaggaaggcggtgctcttcaggctgttcggcgtcgaggtccgcggagcggaggaggaggaggaggatgacgcggagcccatggagctcaagaagagcaccagcatgcccaacctcgcctccatcggcccgattctaccgcgcggcgaggccagcgccagccacgacaagggctacgcctccgacgacggcgagctggcgtccacgccgcagctcaagcgccgccgccgcaaggcccaggagcgcaagaaagggattccgtggaccgaggaggagcacaggaagttcctggagggtctgaagcagctgggcaagggggactggagaggcatctccaagaacttcgtcaccaccaggacggccacgcaggtggccagccacgcccagaagtacttcctccggcagaccaaccccggcaagaagaagcgccgggccagcctcttcgacgtcggcatccccgccggccacggctacgacgatcagctgccgagtcctcacagtgttggaaccaagcttgctcctgccgagaagatactccacaccgaccgcggcgacgtgccgctaccaagttattctgaagtcatcaggggcaacaacaacaacaacacccagatgcaggctgatgaactaactgaccatgcgaagaagagatcaaagttccccaccggaatgtcgctgaccgccatggctgcctccgggcttgagctggcaatgtcttcctctcccagcagcatcctggagctcagcatcgggcctcctcgccactgcgcggtcgatgccatcaaggtgctgtga

SEQ ID NO: 47 - protein, 270 aa, Hordeum vulgare
MEEEGGARKAVLFRLFGVEVRGAEEEEEDDAEPMELKKSTSMPNLASIGPILPRGEASASHDKGYASDDGELASTPQLKRRRRKAQERKKGIPWTEEEHRKFLEGLKQLGKGDWRGISKNFVTTRTATQVASHAQKYFLRQTNPGKKKRRASLFDVGIPAGHGYDDQLPSPHSVGTKLAPAEKILHTDRGDVPLPSYSEVIRGNNNNNTQMQADELTDHAKKRSKFPTGMSLTAMAASGLELAMSSSPSSILELSIGPPRHCAVDAIKVL

SEQ ID NO: 48 - DNA, 798 bp, Oryza sativa
atggagcagcatgaggaggcagcggagaggaagccttcgccgccggtgatattccggctgttcggcgtcgaggtccgcggcggcggcggcggagttgacgaggaggagtacgaggaggaggaggtggagggtggattgttcatcaagaagagctccagtatgcccaacctcacctccatcgacccgctgccggtgccggccgacggcggcaaacggcgcgcctccgacgactccgagctcgcctccggccagcagaagcgccgccgccgcaaggtgcaggagaggaagaaaggggtaccatggactgaggaggagcacaagaaattcctggaagggctgaggcagctggggaaaggggactggagaggcatctccaagaactttgtgaccagcaggacggcgactcaggtggccagccacgcccagaagtacttcctccggcagaccaaccctggcaaaaagaagcgccgggccagcctctttgatgttgttgctgagtgcagtgatgatcagcttccaagtcctcagagtgttggaactaagcctcctacccaggatataattcatacagatcgcggcgatgtcccgatactaagctatccagttgctagaggctttagaggcgatagcgtgcaggttgatgaactaactgaatatgtgaagagattaaaggccgccgaggacatgtcgctctccatgatctctggactggaaatggcatcatcatccatcagcagtctagagctcagtatcgcgcctcctcattgcgcgatcgaggcggccatcaaggtgctgtga

SEQ ID NO: 49 - protein, 265 aa, Oryza sativa
MEQHEEAAERKPSPPVIFRLFGVEVRGGGGGVDEEEYEEEEVEGGLFIKKSSSMPNLTSIDPLPVPADGGKRRASDDSELASGQQKRRRRKVQERKKGVPWTEEEHKKFLEGLRQLGKGDWRGISKNFVTSRTATQVASHAQKYFLRQTNPGKKKRRASLFDVVAECSDDQLPSPQSVGTKPPTQDIIHTDRGDVPILSYPVARGFRGDSVQVDELTEYVKRLKAAEDMSLSMISGLEMASSSISSLELSIAPPHCAIEAAIKVL

SEQ ID NO: 50 - DNA, 837 bp, Sorghum bicolor
atggaggaggagcaggggaggttgacgacgatgacgccgggggtcctcaggttgttcggcgtggacgtccgctggggcgacggaggggaaccggaggagttgccgatggacctgaaaaagagctccagcaagcccaacctcaccatccaccagccgctgctgccgccgggggaggccggagacggcaaggggtacgcctccgacgacgcggagctggcgtccggccagcagaagcgccgccgccgcaaggcacaggagaggaagaaaggaattccatggacggaggaggagcacaagaaattcctggaaggcctaaggaatctgggcaagggggactggaggggcatctccaagggcttcgtcaccaccaggacggcgacgcaggtggccagccatgcccagaagtacttcctccggcagaccaaccccggcaagaagaagcgccgggcgagcctcttcgacgtcggcatcgctgacttcaactacatggacgatcaggtgccaagccctcagagaagcattgttaccaagccggctcctacgcaggagataattcataccgaccgtggcgatgtgccctatagaggcgacttcggggagattttaggcaataacatgcaggttaatcatcaactaactgattattactacttcaagaaggacccaaatgttcacttggagacatcgctctccatggcctccggcctggaaacagcctcatcatccaccaacagtctgaacctcagcatcatcgccgtcgacagtctggagctcagcatcgcgccccctgctcggtgcggctgcggtggcctggcaggggccatcaaagtcctgtga

SEQ ID NO: 51 - protein, 278 aa, Sorghum bicolor
MEEEQGRLTTMTPGVLRLFGVDVRWGDGGEPEELPMDLKKSSSKPNLTIHQPLLPPGEAGDGKGYASDDAELASGQQKRRRRKAQERKKGIPWTEEEHKKFLEGLRNLGKGDWRGISKGFVTTRTATQVASHAQKYFLRQTNPGKKKRRASLFDVGIADFNYMDDQVPSPQRSIVTKPAPTQEIIHTDRGDVPYRGDFGEILGNNMQVNHQLTDYYYFKKDPNVHLETSLSMASGLETASSSTNSLNLSIIAVDSLELSIAPPARCGCGGLAGAIKVL

SEQ ID NO: 52 - DNA, 666 bp, Zea mays
atggacatggaccggccggaggaggaggggcagcagcggagggagacgatgacgccggtgctcctcaggctgttcggcgtggacgtccaccggggtggcggcagcggggagccggaggagtcgccgatggacctgaggaagagctccagcatgcccgacctcaccatcaacccgctgctgtcgccggaggagaaagagggctgcaaggggtacgcctccgacgacgcggagctggcgtccggccagcagaagcgccgccgtcgcaaggcacaggacaggaagaaaggaattccatggaccgaggaggagcacaggaagttcctggacgggctaaggcagctgggcaagggggactggaggggcatctccaagggcttcgtcaccaccaggacggcgacgcaggtggccagccacgcccagaagtacttcctccggcagaccaaccccggtatgaagaagcgccgggcgagcctcttcgacgtcggtatcgcggactacaaggacaaccaggtgccaggccctcagagcatcgtcgctgccaaaccggcgcctacgcaggagataatccacaccgaccgcggcgacgtccccgtaatttatatactccttccgctgtgttttctccttgtcctggtggtaactgagaacccaagatctgaacagtga

SEQ ID NO: 53 - protein, 221 aa, Zea mays
MDMDRPEEEGQQRRETMTPVLLRLFGVDVHRGGGSGEPEESPMDLRKSSSMPDLTINPLLSPEEKEGCKGYASDDAELASGQQKRRRRKAQDRKKGIPWTEEEHRKFLDGLRQLGKGDWRGISKGFVTTRTATQVASHAQKYFLRQTNPGMKKRRASLFDVGIADYKDNQVPGPQSIVAAKPAPTQEIIHTDRGDVPVIYILLPLCFLLVLVVTENPRSEQ

SEQ ID NO: 54 - DNA, 846 bp, Zea mays
atggacatggaccggccggaggaggaggggcagcagcggagggagacgatgacgccggtgctcctcaggctgttcggcgtggacgtccaccggggtggcggcagcggggagccggaggagtcgccgatggacctgaggaagagctccagcatgcccgacctcaccatcaacccgctgctgtcgccggaggagaaagagggctgcaaggggtacgcctccgacgacgcggagctggcgtccggccagcagaagcgccgccgtcgcaaggcacaggacaggaagaaaggaattccatggaccgaggaggagcacaggaagttcctggacgggctaaggcagctgggcaagggggactggaggggcatctccaagggcttcgtcaccaccaggacggcgacgcaggtggccagccacgcccagaagtacttcctccggcagaccaaccccggtatgaagaagcgccgggcgagcctcttcgacgtcggtatcgcggactacaaggacaaccaggtgccaggccctcagagcatcgtcgctgccaaaccggcgcctacgcaggagataatccacaccgaccgcggcgacgtccccataccaagatatagaggcctcggagagattttaggcagtaacatgcaggttaatcaactgactgactactactatttcaacaagaactcccatgttcccgcggggacttcgctctccatggcctccggcctggaaacggcctcgaccgtcgacagcctggagctcagcatcgccgtcaacggcctggagctcagcatcgcgcccccttcccggtgcgtctgcggcggcgcggcgggggccatcaaggttctgtga

SEQ ID NO: 55 - protein, 281 aa, Zea mays
MDMDRPEEEGQQRRETMTPVLLRLFGVDVHRGGGSGEPEESPMDLRKSSSMPDLTINPLLSPEEKEGCKGYASDDAELASGQQKRRRRKAQDRKKGIPWTEEEHRKFLDGLRQLGKGDWRGISKGFVTTRTATQVASHAQKYFLRQTNPGMKKRRASLFDVGIADYKDNQVPGPQSIVAAKPAPTQEIIHTDRGDVPIPRYRGLGEILGSNMQVNQLTDYYYFNKNSHVPAGTSLSMASGLETASTVDSLELSIAVNGLELSIAPPSRCVCGGAAGAIKVL

SEQ ID NO: 56 - DNA, 1020 bp, Oryza sativa
atgcctcaagattcgcgccccgccgcgatgcgcctcttcggcgtcaccatctcgccgccgccgccgccgccggagccggagccggagccggatccgtccgacccccgggatccgagcccgcggccggcgagggaggacgcgatgcgcaagtgcaagagcatgggcaacctcgccgccgccgccgccgcctcctccgccgcagccggcggcggcggcgccggggacgccgggggatcgggcgacgggtacctctccgacggtgggctgctgctgtcctccggcaagcggcggcgcgcgcaggagaggaagaaagctgtcccttggactgaagaagagcaccgaacatttcttgctggtcttgaaaagctaggaaagggggactggaggggtatatctaagaactttgttactaccaggactccaactcaagtggctagtcatgctcagaaatattttcttagacaaactaatccaaacaagaagaagcgcagatcaagcctttttgatatgatggcaactgatatgtcaccagcaccaaactgccctgtcttgccaccatcaatgggaaaattacatgatatggtagctatgactaaacaactccagaacagcagtttggaaggagtctcatcttcaagcacagttaatctagcaccacaagttgcaagagatcttcctcccccaattccatcttttaaagcaacaaatgtagattcaagtctcagcaaaatgaaccacatggacggtttcttgagggcgcccatgctgttcagaccaattccaagaatcgctgaaggggcatcttcatcgactcctgcaactgcaagcatagctgatctggaatttcaagctaacctgactgcatgttctaatgcattattcgcgagtccgagaagaaagccaaagaaggcagatcctccagcagagaaggatctggatctgacagttgccccaccctcccaacaaaccagggccagtatttcttcccagaacgcagtaggcgtaattcaagtcgtatag

SEQ ID NO: 57 - protein, 339 aa, Oryza sativa
MPQDSRPAAMRLFGVTISPPPPPPEPEPEPDPSDPRDPSPRPAREDAMRKCKSMGNLAAAAAASSAAAGGGGAGDAGGSGDGYLSDGGLLLSSGKRRRAQERKKAVPWTEEEHRTFLAGLEKLGKGDWRGISKNFVTTRTPTQVASHAQKYFLRQTNPNKKKRRSSLFDMMATDMSPAPNCPVLPPSMGKLHDMVAMTKQLQNSSLEGVSSSSTVNLAPQVARDLPPPIPSFKATNVDSSLSKMNHMDGFLRAPMLFRPIPRIAEGASSSTPATASIADLEFQANLTACSNALFASPRRKPKKADPPAEKDLDLTVAPPSQQTRASISSQNAVGVIQVV

SEQ ID NO: 58 - DNA, 1008 bp, Sorghum bicolor
atgcctcgagattcgcgcccactcgggatgcgcctcttcggcgtcaccatcgcgccggcgccggcgccggaggcggatccgccggaacgggatccgagtcccaacccgcccgtggcggccagggaggacgtgatgcgcaagtgcaagagcatgggcaacctcgccgctcttggcgctggcgcggacggtggaggaggtggcgcggacggcggaggcgccggcgacgggtacctctccgatggcgggctgatgcagtcgtccgggaagcggcggagggcgcaggagaggaagaaagctgttccttggactgaagaggagcatagaacatttcttgctggtcttgaaaagctagggaagggtgactggaggggcatagcgaaaaattttgttaccaccagaacaccaactcaagttgcaagtcatgctcagaaatattttcttagacaaactaatccaaacaagaagaagcgcagatctagtctttttgacatgatgccaagagagctgtcaccaacaccaaattgccccatattacctccatcaatggcaaaagtacatgacgtggtagctatgacgaaacagctccagaatagcaacttggaaggagcctcatcttccaacgccgctaatgtagcatctcaagttggaagagatctccccccagttccatcttttaaggcaacaaatatggattcaagtttcagcaaatttagccacatggagcgctactggagaactccctacccattcagaccaatttctagagcccccgaagggacgtcttcatcaactcctgttgctgccaatatagctgttccagcctctcaagctaacctgactgcatgtactagcacattcttgagccagcgaggtgatacttcatcattgcctccgaagggagatcctccatcagaggaggatttggaactgactgttgccccaccctcccaacaaaacatgaccaatatgtcttcccagaatgcggtaggcgtgattcaagtcatctaa

SEQ ID NO: 59 - protein, 335 aa, Sorghum bicolor
MPRDSRPLGMRLFGVTIAPAPAPEADPPERDPSPNPPVAAREDVMRKCKSMGNLAALGAGADGGGGGADGGGAGDGYLSDGGLMQSSGKRRRAQERKKAVPWTEEEHRTFLAGLEKLGKGDWRGIAKNFVTTRTPTQVASHAQKYFLRQTNPNKKKRRSSLFDMMPRELSPTPNCPILPPSMAKVHDVVAMTKQLQNSNLEGASSSNAANVASQVGRDLPPVPSFKATNMDSSFSKFSHMERYWRTPYPFRPISRAPEGTSSSTPVAANIAVPASQANLTACTSTFLSQRGDTSSLPPKGDPPSEEDLELTVAPPSQQNMTNMSSQNAVGVIQVI

SEQ ID NO: 60 - DNA, 672 bp, Saccharum officinarum
atgcctcgagattcgcgccgagccgggatgcgcctcttcggcgtcaccatcgcgctggcgccggagggggatccgccggaacgggatccgagccccaacccgcccgtggcggccagggaggacgtgatgcgcaagtgcaagagcatgggcaacctcgccgctcttgtcgctggcgctgacggtggaggaggtagcgcgaacggcggaggtgccggggacgggtacctctccgatggcgggctgacgcagtcgtccgggaagcggcggagggcgcaggagaggaagaaagctgttccttggactgaagaggagcatagaacatttcttgctggtcttgaaaagctagggaagggagactggaggggtatagcaaaaaatttcgttaccaccagaacaccaactcaagttgcaagtcatgctcagaaatattttcttagacaaactaatccaaacaagaagaagcgcagatctagtctttttgacatgatgccaagagagctgtcaccaacaccaaattgccccatattaccaccatcaatggcaaaagtacatgacgtggtaactatgacgaaacagctccagaatagcaacttggaaggagcctcatcttccaatgcagctaatgtagcatctaaagttggaagagatcctcccccagttccatctttttag

SEQ ID NO: 61 - protein, 223 aa, Saccharum officinarum
MPRDSRRAGMRLFGVTIALAPEGDPPERDPSPNPPVAAREDVMRKCKSMGNLAALVAGADGGGGSANGGGAGDGYLSDGGLTQSSGKRRRAQERKKAVPWTEEEHRTFLAGLEKLGKGDWRGIAKNFVTTRTPTQVASHAQKYFLRQTNPNKKKRRSSLFDMMPRELSPTPNCPILPPSMAKVHDVVTMTKQLQNSNLEGASSSNAANVASKVGRDPPPVPSF

SEQ ID NO: 62 - DNA, 1032 bp, Zea mays
atgcctcgagattcgcgcccagccgggatgcgcctcttcggcgtcaccatcgcgccggcgccggaggcggatccaccggtacgggatccgagccccaacccgcccgtggcggccagggaggacgtgatgcgtaagtgcaagagcatgggcaacctcgccgcccttggcgctgtcgtggacggtggaggaggtggtgcggacggcggaggcgccggcgacggctacctctccgatggcgggctgatgcagtcgtccgggaagcggcggagggcgcaggagaggaagaaagctgttccctggactgaagaagagcataggacatttcttgctggtcttgaaaagctagggaagggagactggaggggcatagcaaaaaattttgttaccaccagaacaccaactcaagttgcaagtcatgctcagaaatattttcttaggcaaactaatccaaacaagaagaagcgcagatctagtctttttgacatgatgccaagagagctgtcaccagcaccaaattgccccatattaccaccatcgatggcaaaagtacacgatgtggtagctatgacgaaacaacttcagaatagcaacttggaaggaacctcctcttcaaatgcagcatctcaagttggaagagatctccccccagttccatcttttaaggcaacaaatatggatccaagtttcagcaaatttagccacatggagcgcgtctggagaactccctacccattcggaccagttcccagagcccctgaagggacgccttcaccaactcctgctgctgctgctgctgctgctgctgcggctgccaatgcagctgttccggtctctcaagctaacctgacgactgcctgtactagtaacacattcttgagccagccaaagccaagtgatactccgtcactgcctccgaagggaggtcctccatcagaggaggacggtttggaactgactgttgccccaccctcccaacagaacatgacgaacatgtcttcccagaatgcggtaggcgtgatccaagtcatttaa

SEQ ID NO: 63 - protein, 343 aa, Zea mays
MPRDSRPAGMRLFGVTIAPAPEADPPVRDPSPNPPVAAREDVMRKCKSMGNLAALGAVVDGGGGGADGGGAGDGYLSDGGLMQSSGKRRRAQERKKAVPWTEEEHRTFLAGLEKLGKGDWRGIAKNFVTTRTPTQVASHAQKYFLRQTNPNKKKRRSSLFDMMPRELSPAPNCPILPPSMAKVHDVVAMTKQLQNSNLEGTSSSNAASQVGRDLPPVPSFKATNMDPSFSKFSHMERVWRTPYPFGPVPRAPEGTPSPTPAAAAAAAAAAANAAVPVSQANLTTACTSNTFLSQPKPSDTPSLPPKGGPPSEEDGLELTVAPPSQQNMTNMSSQNAVGVIQVI

SEQ ID NO: 64 - DNA, 1005 bp, Aquilegia formosa x pubescens
atgacgagaaggtgttcacattgtagtaataatgggcataattcaagaacttgcccaaatagaggtgtgaagttatttggagttagattaacagatggatcgattaggaaaagtgctagtatgggtaatttatctcattataatggattgaatcaacatagtagtagtattaatcattttgattcacctggtgaaacacctgaacatggtggtgttggtgaagaagatggttatgcttctgaggattttgttaaaggctcttcttctagttgtcgcgaaaggaagaaaggcgtgccttggactgaagaggagcacaggatgtttctacttggtctgcaaaagctaggaaaaggtgattggcgggggatagcacgcaattatgtaatatcaagaacacctactcaggtggctagccatgcccagaagtacttcattcggcaaacaaatatgtccagaagaaaaagacggtccagcctttttgacattgtagcagatgaatcagtcgacacttcccaagttctagcacaggatctcttccctatcagtcacgtaactgctgaaacacagtacagtacattggaagcaccaccagctattgatgaagaatgtgaatcaatggattctaccaattctgtcgatggagaagcttttcttcctcaagacagtttccagagtaattatccagtgatatttccttcctatttttcaccattcttcccattttctttcccactttggccgggatacgcaacagaggcagcaatgacgcaagagactcatgaagtcgttaagccgacggcagtgcattcaaagagtccaatcaatgttgatgagctggttggcatgtcaaaattgagcctaggagaatcctttaataactcagagccttcaccactctccttaaaattggtggaaggaaccagtaggcagtcagcatttcatgcaaatccttcgacaagcagttcaaacataaactcaagcaagaacccaattcatgcagtctga

SEQ ID NO: 65 - protein, 334 aa, Aquilegia formosa x  pubescens
MTRRCSHCSNNGHNSRTCPNRGVKLFGVRLTDGSIRKSASMGNLSHYNGLNQHSSSINHFDSPGETPEHGGVGEEDGYASEDFVKGSSSSCRERKKGVPWTEEEHRMFLLGLQKLGKGDWRGIARNYVISRTPTQVASHAQKYFIRQTNMSRRKRRSSLFDIVADESVDTSQVLAQDLFPISHVTAETQYSTLEAPPAIDEECESMDSTNSVDGEAFLPQDSFQSNYPVIFPSYFSPFFPFSFPLWPGYATEAAMTQETHEVVKPTAVHSKSPINVDELVGMSKLSLGESFNNSEPSPLSLKLVEGTSRQSAFHANPSTSSSNINSSKNPIHAV

SEQ ID NO: 66 - DNA, 1164 bp, Arabidpsis thaliana
atgactcgtcggtgttcgcattgtagcaacaatgggcacaattcacgcacgtgtccaacgcgtggtggtggcacgtgcggtggaagtggcggaggaggaggaggtggtggtggaggagggtctggttcctcctccgccgtgaagttatttggtgtgaggttaacggatggctcgattattaaaaagagtgcgagtatgggtaatctctcggcattggctgttgcggcggcggcggcaacgcaccaccgtttatctccgtcgtctcctctggcgacgtcaaatcttaatgattcgccgttatcggatcatgcccgatactctaatttgcatcataatgaagggtatttatctgatgatcctgctcatggttctgggtctagtcaccgtcgtggtgagaggaagagaggtgttccttggactgaagaggaacatagactattcttagtcggtcttcagaaactcgggaaaggagattggcgcggtatttcgagaaactatgtaacgtcaagaactcctacacaagtggctagtcatgctcaaaagtattttattcgacatactagttcaagccgcaggaaaagacggtctagcctcttcgacatggttacagatgagatggtaaccgattcatcgccaacacaggaagagcagaccttaaacggttcctctccaagcaaggaacctgaaaagaaaagctaccttccttcacttgagctctcactcaataataccacagaagctgaagaggtcgtagccacggcgccacgacaggaaaaatctcaagaagctatagaaccatcaaatggtgtttcaccaatgctagtcccgggtggcttctttcctccttgttttccagtgacttacacgatttggctccctgcgtcacttcacggaacagaacatgccttaaacgctgagacttcttctcagcagcatcaggtcctaaaaccaaaacctggatttgctaaagaacgtgtgaacatggacgagttggtcggtatgtctcagcttagcataggaatggcgacaagacacgaaaccgaaacttccccttccccgctatctttgagactagagccctcaaggccatcagcgtttcactcgaatggctcggttaatggtgcagatttgagtaaaggcaacagcgcgattcaggctatctaa

SEQ ID NO: 67 - protein, 387 aa, Arabidopsis thaliana
MTRRCSHCSNNGHNSRTCPTRGGGTCGGSGGGGGGGGGGGSGSSSAVKLFGVRLTDGSIIKKSASMGNLSALAVAAAAATHHRLSPSSPLATSNLNDSPLSDHARYSNLHHNEGYLSDDPAHGSGSSHRRGERKRGVPWTEEEHRLFLVGLQKLGKGDWRGISRNYVTSRTPTQVASHAQKYFIRHTSSSRRKRRSSLFDMVTDEMVTDSSPTQEEQTLNGSSPSKEPEKKSYLPSLELSLNNTTEAEEVVATAPRQEKSQEAIEPSNGVSPMLVPGGFFPPCFPVTYTIWLPASLHGTEHALNAETSSQQHQVLKPKPGFAKERVNMDELVGMSQLSIGMATRHETETSPSPLSLRLEPSRPSAFHSNGSVNGADLSKGNSAIQAI

SEQ ID NO: 68 - DNA, 1098 bp, Arabidopsis thaliana
atgactcgtcgatgttctcactgcaatcacaatggccacaactctcggacttgtcccaatcgcggcgtgaagctctttggtgttcggctcaccgaaggttcgatccggaaaagtgcaagtatgggtaatcttagccattacacgggttctggatcgggtgggcatggaaccgggtccaacactccgggttctccgggtgatgtccctgaccatgtcgctggtgatggttacgcttctgaggatttcgttgctggctcttcctctagccgcgagagaaagaaaggaactccatggacagaggaagaacacaggatgttcttattaggtttacagaagctgggtaaaggtgattggagaggtatctcaagaaactatgtgaccactaggacacctacacaagttgctagccatgctcagaagtatttcatcagacaatccaatgtctctcgtcgcaaaagacgttctagtctctttgatatggttcctgatgaggttggagatattcccatggatttgcaagaaccagaggaagataatattcctgtggaaactgaaatgcaaggtgctgactctattcatcagacacttgctcctagctcacttcacgcaccgtcaatcttggaaatcgaagaatgtgaatcaatggactccacaaactctaccaccggggaaccaaccgcaactgccgctgctgcttcttcttcttccagactagaagaaaccacacaactgcaatcacaactgcaaccgcagccgcaactacctggctcattccccatactatatccgacctacttttcaccatattacccgtttccattcccaatatggcctgctggttatgttcctgaaccacccaagaaagaggaaactcatgaaattctcagaccaactgctgtgcactcgaaagctcctatcaatgttgacgagcttcttggtatgtctaagctcagccttgcagagtccaacaaacatggagaatccgatcagtctctttcattgaagctaggtggcgggtcatcttcaagacaatcagcatttcacccgaatcctagctctgatagttcagacatcaaaagcgtgatacacgctttataa

SEQ ID NO: 69 - protein, 1338 aa, Arabidopsis thaliana
MTRRCSHCNHNGHNSRTCPNRGVKLFGVRLTEGSIRKSASMGNLSHYTGSGSGGHGTGSNTPGSPGDVPDHVAGDGYASEDFVAGSSSSRERKKGTPWTEEEHRMFLLGLQKLGKGDWRGISRNYVTTRTPTQVASHAQKYFIRQSNVSRRKRRSSLFDMVPDEVGDIPMDLQEPEEDNIPVETEMQGADSIHQTLAPSSLHAPSILEIEECESMDSTNSTTGEPTATAAAASSSSRLEETTQLQSQLQPQPQLPGSFPILYPTYFSPYYPFPFPIWPAGYVPEPPKKEETHEILRPTAVHSKAPINVDELLGMSKLSLAESNKHGESDQSLSLKLGGGSSSRQSAFHPNPSSDSSDIKSVIHALSEQIDNDNABRACHYPDIMDISTACHYNATGACGAGGCGGTGCTCGCACTGCAGCCACAACGGGCACAACTCCCGGACGTGCCCCAACCGCGGGGTCAAGATCTTCGGGGTGCGACTCACCGATGGCTCCGCCATCCGCAAGAGCGCCAGCATGGGGAACCTCTCCCTGCTCGCCGCCGGATCCAGCAGCGGCGGCGGCGCGTCCCCCGCCCACGACGCCCACTCCCACGCCGACGGCTACGCCTCCGACGACTTCGTGCAGGGCTCGTCCTCCGCCAACCGCGAGCGCAAGAAAGGGGTTCCTTGGACTGAAGAAGAACACAGGAGGTTTTTGCTTGGATTGCAAAAGCTTGGAAAGGGGGATTGGCGAGGAATTTCTCGTAATTTTGTGGTTTCAAGAACTCCTACTCAAGTAGCAAGTCATGCGCAGAAATATTTTATACGCCAAGCCAATATGAGCAGAAGGAAGAGAAGGTCTAGCCTTTTTGACTTGGTGCCTGATGAGTCCGACCTGCCACCACTTCCTGGGAATCATGAACCAGAGGCCCAATTGTTAAATCAACCACCACTACCTCCACCCATGGAGGAGGAGGAGGTAGAATCCATGGAATCAGATACTTCTGCCATTGCAGAGAGTTCTTCAGCCTCTGCTATCATGCCAGAGAATTTGCAGTCAAGCTATCCAGTATTGGTTCCAGCTTATTTCTCACCATTCTTGCAATTCTCAGTTCCTTTTTGGCAAAGTCAGAACGATGGGGATGATCTTCGACAAGGAACACATGAGATTGTCAGGCCCGTTCCGATTCATTCAAAGAATCCAATCAATGTTGATGAGCTGGTTGGCTTGTCGAAGCTAAGCATAGGGGATCCCAAGCAAGAGACAGTATCTACTTCTCTTTCACTAAAGTTGGTAGGAGGTCAAAATAGGCAATCAGCTTTCCAGGCAAATCCCCCGACAAGGGCTCAGGCGTGA

SEQ ID NO: 70 - DNA, 945 bp, Brachypodium distachyon
atgacgaggcggtgctcgcactgcagccacaacgggcacaactcccggacgtgccccaaccgcggggtcaagatcttcggggtgcgactcaccgatggctccgccatccgcaagagcgccagcatggggaacctctccctgctcgccgccggatccagcagcggcggcggcgcgtcccccgcccacgacgcccactcccacgccgacggctacgcctccgacgacttcgtgcagggctcgtcctccgccaaccgcgagcgcaagaaaggggttccttggactgaagaagaacacaggaggtttttgcttggattgcaaaagcttggaaagggggattggcgaggaatttctcgtaattttgtggtttcaagaactcctactcaagtagcaagtcatgcgcagaaatattttatacgccaagccaatatgagcagaaggaagagaaggtctagcctttttgacttggtgcctgatgagtccgacctgccaccacttcctgggaatcatgaaccagaggcccaattgttaaatcaaccaccactacctccacccatggaggaggaggaggtagaatccatggaatcagatacttctgccattgcagagagttcttcagcctctgctatcatgccagagaatttgcagtcaagctatccagtattggttccagcttatttctcaccattcttgcaattctcagttcctttttggcaaagtcagaacgatggggatgatcttcgacaaggaacacatgagattgtcaggcccgttccgattcattcaaagaatccaatcaatgttgatgagctggttggcttgtcgaagctaagcataggggatcccaagcaagagacagtatctacttctctttcactaaagttggtaggaggtcaaaataggcaatcagctttccaggcaaatcccccgacaagggctcaggcgtga

SEQ ID NO: 71 - protein, 314 aa, Brachypodium distachyon
MTRRCSHCSHNGHNSRTCPNRGVKIFGVRLTDGSAIRKSASMGNLSLLAAGSSSGGGASPAHDAHSHADGYASDDFVQGSSSANRERKKGVPWTEEEHRRFLLGLQKLGKGDWRGISRNFVVSRTPTQVASHAQKYFIRQANMSRRKRRSSLFDLVPDESDLPPLPGNHEPEAQLLNQPPLPPPMEEEEVESMESDTSAIAESSSASAIMPENLQSSYPVLVPAYFSPFLQFSVPFWQSQNDGDDLRQGTHEIVRPVPIHSKNPINVDELVGLSKLSIGDPKQETVSTSLSLKLVGGQNRQSAFQANPPTRAQA

SEQ ID NO: 72 - DNA, 948 bp, Brassica napus
atgactcgccgctgttctcactgcaaccaaaacggacacaactcacgtacatgtccgaatcgtggtgtcaagctcttcggtgttcgtctcaccgaaggctctatacgcaaaagtgccagtatgggtaatctcagccaccactcggggtctggattgagtggactcgtgtcgaacaatccgggctctcctggcaatggccctgacaacgacggttacgcctccgaggattttgttcccggctcatcctctagccaccgtgagagaaagaaagggaatccatggagggaagaggagcataggatgttcttgttgggtctacagaagctggggaaaggtgattggagaggtatctctaggaactatgtgaagacgaggacgcctactcaagtcgcaagtcatgctcagaagtatttcatcagacagtccaatgtctcccgccgcaagagacgttctagtctctttgatatcattcctgacgaggccactgactctgttccggcggcaccgttgatcctggaaacggaagagtgtgagtcaatgaaatccaccaactctgttggtgttgaggcaccagaagacagcatccaaacgcagctacaaccaccaccgcctggttcattccctgtgctgtatccggcttacttctcaccattctactcattccccttcccggtgtggcctgctgcgtatgataccgagccggcgaaggaagagactcaccagattctcaggccaacagctgtgcactcaaaagccgccccgattaaggttgatcaacttcttggtatgtctaagctcagcctcaaggagtctagccaaaacggtgtatcggaagagtctctttcactgaaactcgttggaggttcgtcttctaggcaatctgcctttcatccaaatccagctagtgatggtggttcggacatgaacacagtgattcatgctgtctaa

SEQ ID NO: 73 - protein, 315 aa, Brassica napus
MTRRCSHCNQNGHNSRTCPNRGVKLFGVRLTEGSIRKSASMGNLSHHSGSGLSGLVSNNPGSPGNGPDNDGYASEDFVPGSSSSHRERKKGNPWREEEHRMFLLGLQKLGKGDWRGISRNYVKTRTPTQVASHAQKYFIRQSNVSRRKRRSSLFDIIPDEATDSVPAAPLILETEECESMKSTNSVGVEAPEDSIQTQLQPPPPGSFPVLYPAYFSPFYSFPFPVWPAAYDTEPAKEETHQILRPTAVHSKAAPIKVDQLLGMSKLSLKESSQNGVSEESLSLKLVGGSSSRQSAFHPNPASDGGSDMNTVIHAV

SEQ ID NO: 74 - DNA, 1056 bp, Brassica oleracea
atgactcgtcgatgttctcactgcaaccacaacggccacaactctcggacatgtcccaatcgcggggtgaagctatttggcgttagactcaccgaaggttcgatccggaaaagtgctagtatggggaatcttagccactacacgggctccggatcgggcgggcatgggtcgggttctcctggtgatgtccctgaccatgtcgctggtggtgatggttacgcttctgaggatttcgttgctggctcttcttcctctagccgcgagagaaagaaaggaactccatggacagaggaagaacacaggatgttcttgttaggtttacagaagcttggtaaaggtgattggcgtggcatttcaagaaactatgtgaatacgaggacaccaacacaagttgctagccatgctcagaagtatttcattagacagtctaatgtgtctcgtcgcaaaagacgttctagtctctttgatatgattcctgatgagggagaagatgtaccgatggatcagcaagaaccggaagcagagaacactcccgtggaaacgttgatgcaaagttctgattctgttcatcagacacttgcttttagctcccgtcaagcaccatcaatcttggagatcgatgaatgtgaatctatggactcaacaaactctaccaccggtgaaccaagctccatcgctgctgctgcttcttcttctacgtccatactagaagaaaccacacaaccgcaactacaatcattcccgatactatatccagcctacttctcaccgtattacccgtttccatacccaatatggcccgctggttatgttcctgaaccaaccaagaaagaggagactcatgagattcttagaccaactgcggtgcactctaaagctccgatcaatgtcgacgagcttcttggtatgtctaagcttagccttggagagtccaagaagaagaatggagaatcggatcagtctctttcactgaagctaggtacgagacagtcggcgtttcagccgaatcctagttctgatagttcagacatcaccaacgtggtacatgcggtgtaa

SEQ ID NO: 75 - protein, 351 aa, Brassica oleracea
MTRRCSHCNHNGHNSRTCPNRGVKLFGVRLTEGSIRKSASMGNLSHYTGSGSGGHGSGSPGDVPDHVAGGDGYASEDFVAGSSSSSRERKKGTPWTEEEHRMFLLGLQKLGKGDWRGISRNYVNTRTPTQVASHAQKYFIRQSNVSRRKRRSSLFDMIPDEGEDVPMDQQEPEAENTPVETLMQSSDSVHQTLAFSSRQAPSILEIDECESMDSTNSTTGEPSSIAAAASSSTSILEETTQPQLQSFPILYPAYFSPYYPFPYPIWPAGYVPEPTKKEETHEILRPTAVHSKAPINVDELLGMSKLSLGESKKKNGESDQSLSLKLGTRQSAFQPNPSSDSSDITNVVHAV

SEQ ID NO: 76 - DNA, 1047 bp, Brassica rapa
atgacgcggcgatgctctcactgcaatcactatggtcacaactctaggacatgtcccagtcgtggggtgatgctttttggtgtaaggctcaccggaggttcgatcaggaaaagtgctagtatgggtaatcttcttagccatgggcatgggtcgggttctccgggtgatgtccctgaccatgtcgctggtgatggttacacttctgagggtttcgttgctggctcttcctctagccgcgagagaaagaaaggagctatatggacagaggaagaacataggatgtacttgttaggtttagagaagctaggcaaaggtgattggagaggcatttcaagaaaatatgtgaggacaaggacaccaacacaggttgctagccatgctcagaagcatttcatgagactatctgatgtgtctcgtcgcaaaagacgttctagtctctttgatatgattcctcatgaggttggagttactccgatggatcagcaagaaccggaagcagagaacactcccgtggaaacgttaatgcgaagttctgattctgttcatcagacagttgcttctagctcccgtaaagcaccatcaatcttggagatcgatgaatgtgaatctatggactcaacaaactctaccaccggtgaaccaacctccatcgctgctgctgcttcttcttcttcgtccatactagaagaaaccacacaaccgcaactacaatcattcccgatactatatccagcctacttctcaccgtattacccgtttccatacccaatatggcctgctggttatgttcctgaaccaaccaagaaagaggagactcacgagattctcagaccaactgcagtgcattcaaaagctcctatcaatgtcgacgagcttcttggtatgtctaagcttagccttggagagtccaagaagaagaatggagaatcggatcagtctctttcactgaagctaggtggaggttcagagacgagacaatcaccatttcacccgaatcttagccctcctgatagttcagacatcgccaacgtgatacatgcggcttaa

SEQ ID NO: 77 - protein, 348 aa, Brassica rapa
MTRRCSHCNHYGHNSRTCPSRGVMLFGVRLTGGSIRKSASMGNLLSHGHGSGSPGDVPDHVAGDGYTSEGFVAGSSSSRERKKGAIWTEEEHRMYLLGLEKLGKGDWRGISRKYVRTRTPTQVASHAQKHFMRLSDVSRRKRRSSLFDMIPHEVGVTPMDQQEPEAENTPVETLMRSSDSVHQTVASSSRKAPSILEIDECESMDSTNSTTGEPTSIAAAASSSSSILEETTQPQLQSFPILYPAYFSPYYPFPYPIWPAGYVPEPTKKEETHEILRPTAVHSKAPINVDELLGMSKLSLGESKKKNGESDQSLSLKLGGGSETRQSPFHPNLSPPDSSDIANVIHAA

SEQ ID NO: 78 - DNA, 924 bp, Citrus aurantium
atggggaacttatcggcgctgcactaccatagctcctcgtcggcagccgcttcgccgaatcctgactccccgttatcggatcacgtgcgtgacccgaatcacttgaccgacggttacttgtcggatgacccggcgcacgggtctggttcatcgaatcggcgttgcgagagaaagaaaggtgtcccatggacagaagaggagcatcgcctgtttctaattggccttcagaaattagggaagggagactggcgtggtatagcacgaaattatgtcatgtccaggactccaacccaggtggcaagtcatgcacagaagtattttatccggcagagtaatgctactcgaagaaagaggcgctccagtctttttgacatggttgcggatgatatggccacagataccccaccggtgccagaagagcaagtaatgcttccatctcctcttgccagagaatctgacaatacaagctcacaaccttctctaaatctttctctgagtaccgaatttgaacccatggaagccgtatgtaaagaaacagagaaggattctgaagaacctgtgattgatttgaatgagttcaccccaatggtttccagtttcttcccagcatatatgccagtcccttatacatattggccacataatgcagccaccggggaagaagataaggatgcagggacttctggtaatcatccgatccttaagccaattccaatccttcctaaagaacccgtcaatgtagatcaactagtttgcatgtctcaactgagtataggagagactgaaagaggcctcagagagccttcacctctttccttgaaactactgggagagccgtcgaggcagtcagctttccacgcaaatgccccagtcagcaggtcggatttaagcaagggcaagacgaccccaatacaagcagtttga

SEQ ID NO: 79 - protein, 307 aa, Citrus aurantium
MGNLSALHYHSSSSAAASPNPDSPLSDHVRDPNHLTDGYLSDDPAHGSGSSNRRCERKKGVPWTEEEHRLFLIGLQKLGKGDWRGIARNYVMSRTPTQVASHAQKYFIRQSNATRRKRRSSLFDMVADDMATDTPPVPEEQVMLPSPLARESDNTSSQPSLNLSLSTEFEPMEAVCKETEKDSEEPVIDLNEFTPMVSSFFPAYMPVPYTYWPHNAATGEEDKDAGTSGNHPILKPIPILPKEPVNVDQLVCMSQLSIGETERGLREPSPLSLKLLGEPSRQSAFHANAPVSRSDLSKGKTTPIQAV

SEQ ID NO: 80 - DNA, 651 bp, Coffea canephora
atgactcggcggtgttctcattgcagcaacaatggccataactcccggacgtgtcccacgagaggtggcggtggtggaagcggcggctgtgctggtggtggggtgaatctttttggagtcagattaacagatgggtccatcatgaagaagagtgccagcatgggaaatctatcccattaccattcttcctcgtccgccgccgcgtcgcccatttttagctcgccttcctccgacccctttcatgacccggttcatttgccggatgggtatctctccgatgatcccaatgatgcatctggctctgctaatcgtagagctgaaagaaagaaaggtgttccatggactgaagaagagcacaggctcttccttctcggtcttcaaaagttgggaaaaggtgattggcgcgatatctcccgcaattttgtgacatcaaggactccaacacaggtggcaagccatgcacagaagtattttatccggcagagcaatgccaatcggagaaagagaagatccagtctctttgacatggttcctgatatgtctacagatccactagctccgccggaaaaacaatttgtgctcccaccacaagttgttgatagcagcaagggaacaacttgcaagtccgcatcctctagcaatcggagatga

SEQ ID NO: 81 - protein, 216 aa, Coffea canephora
MTRRCSHCSNNGHNSRTCPTRGGGGGSGGCAGGGVNLFGVRLTDGSIMKKSASMGNLSHYHSSSSAAASPIFSSPSSDPFHDPVHLPDGYLSDDPNDASGSANRRAERKKGVPWTEEEHRLFLLGLQKLGKGDWRDISRNFVTSRTPTQVASHAQKYFIRQSNANRRKRRSSLFDMVPDMSTDPLAPPEKQFVLPPQVVDSSKGTTCKSASSSNRR

SEQ ID NO: 82 - DNA, 822 bp, Citrus clementina
atgacgcggcgctgctcgcattgcagccacagcggccacaactctcggacctgccccaaccgcggggtcaagatcttcggggtccgattgaccgacggctcaatccggaagagtgctagtatgggcaatctcagccactacgccggttcgacttcgggtcataataacaataacgcgtcaaacactcctgattcgcccggtgagacgccggatcatcatgctgacgggtatgcgtcggaagatttcgttcccgggtcatcgtcgagtcgcgaacgcaagaaaggtgttccatggactgaagaggagcataggatgtttttacttggtttgcagaagctggggaaaggtgattggcgtggaattgcacgcaattatgttgtatctagaacacctactcaagttgccagccatgctcaaaaatattttatcaggcaaagcaatgtgtctaggagaaaaagacggtccagcctatttgatattgttgcagatgaaccactcgacactccagctgcatcacaggacttgttttctgccaaccatacgcagggtgaaacacaaagcaacaacccactgcctgctcctcctgctttggatgaagaatgtgaatccatggattctaccaactccaatgatggagagccggccccctcggaagccggaaaactcacagtcctgtatcccaatggtgtatcctgctgcttatgtctcaccattccttccatttacttatccctaattggtccgcgtacaacacaaagcccacaccgaaggaaaacccttgaagtgctgaagccctacacccgtactttcaaagattcctaa

SEQ ID NO: 83 - protein, 273 aa, Citrus clementina
MTRRCSHCSHSGHNSRTCPNRGVKIFGVRLTDGSIRKSASMGNLSHYAGSTSGHNNNNASNTPDSPGETPDHHADGYASEDFVPGSSSSRERKKGVPWTEEEHRMFLLGLQKLGKGDWRGIARNYVVSRTPTQVASHAQKYFIRQSNVSRRKRRSSLFDIVADEPLDTPAASQDLFSANHTQGETQSNNPLPAPPALDEECESMDSTNSNDGEPAPSEAGKLTVLYPNGVSCCLCLTIPSIYLSLIGPRTTQSPHRRKTLEVLKPYTRTFKDS

SEQ ID NO: 84 - DNA, 1002 bp, Citrus clementina
atgacgcggcgctgctcgcattgcagccacaacggccacaactctcggacctgccccaaccgcggggtcaagatcttcggggtccgattgaccgacggctcaatccggaagagtgctagtatgggcaatctcagccactacgccggttcgacttcgggtcataataacaataacgcgtcaaacactcctgattcgcccggtgagacgccggatcatcatgctgacgggtatgcgtcggaagatttcgttcccgggtcatcgtcgagtcgcgaacgcaagaaaggtgttccatggactgaagaggagcataggatgtttttacttggtttgcagaagctggggaaaggtgattggcgtggaattgcacgcaattatgttgtatctagaacacctactcaagttgccagccatgctcaaaaatattttatcaggcaaagcaatgtgtctaggagaaaaagacggtccagcctatttgatattgttgcagatgaaccactcgacactccagctgcatcacaggacttgttttctgccaaccatacgcagggtgaaacacaaagcaacaacccactgcctgctcctcctgctttggatgaagaatgtgaatcaatggattctaccaactccaatgatggagagccggcccctccgaagccggaaaactcacagtcctgtatcccaatggtgtatcctgctgcttatgtctcaccattctttccatttacttatccatattggtcggcgtacaacacagagccaacacagaaggaaacacatgaagtgctgaagcctacagcagtacattcaaagagtcctataaatgttgatgaactggttggcatgtcgaaactgtgtttgggagaatctattggtcagaatggtccatcttctctctcattgaaacttgatgaagggtcgtctaggcagtcagccttccatgctaatccagcctctggcagctctggaatgaattcaagcggcagtcctattcatgcactctaa

SEQ ID NO: 85 - protein, 333 aa, Citrus clementina
MTRRCSHCSHNGHNSRTCPNRGVKIFGVRLTDGSIRKSASMGNLSHYAGSTSGHNNNNASNTPDSPGETPDHHADGYASEDFVPGSSSSRERKKGVPWTEEEHRMFLLGLQKLGKGDWRGIARNYVVSRTPTQVASHAQKYFIRQSNVSRRKRRSSLFDIVADEPLDTPAASQDLFSANHTQGETQSNNPLPAPPALDEECESMDSTNSNDGEPAPPKPENSQSCIPMVYPAAYVSPFFPFTYPYWSAYNTEPTQKETHEVLKPTAVHSKSPINVDELVGMSKLCLGESIGQNGPSSLSLKLDEGSSRQSAFHANPASGSSGMNSSGSPIHAL

SEQ ID NO: 86 - DNA, 1023 bp, Cichorium intybus
atgacaaggcgctgctctcattgcagtaacaatgggcacaactcccgtacctgtcctaatcgcggtttgaagctgtttggagttcgaattacggatggatccatccgtaaaagtgctagtatgggtaacttgactcattacacaggatccggcagcggcggcggtgctttgaacagtttatccggcggcggcggcggcacagacgtggattctcccggagacacaccagatcataacgccgctgccgacggctatggctcggaagacttcattgccgggtcgtcttctggtcgtgaaagaaaaaaaggtgttccctggacagaggaagaacacaggatgtttctactgggcctgaagaagcttgggaaaggggattggcgtgggatcgccagaaactatgtgatttcaagaacaccgactcaagttgcaagccatgcccagaaatattttatcaggcaaaccaatatgtccagaagaaaaagacggtccagcctctttgatatggttcccaatgatgttgatccccttgatactgtccatgatggagagacgcaatccatcaacaaccctatgtgtgttagtgttcctacagtggaggaaaaacaagaagaggaagaagaagaatgtgaatcaatggattctggcagctcaaacatggctatcggcctgatgcaacaagggtactgttaccctgctgccatgtttccagcttatttatcgccatttataccggttgctattccattttggggtgggtcaggtccaggggctaaaacagagtctcatgaggtccttaaacccacagcagtccattccaagagccccatcaatgtggatgagcttgtaggcttgtccaaactcagtttaggagaatccatcggggatggtggggccaattccttgaagttggtgggaagtttaagtaggcagtctgcatttcatgcttctaataattctaatcctacaagaagtagttctagtagcatgggggggtcaggccacagtcccattcatgcattgtag

SEQ ID NO: 87 - protein, 340 aa, Cichorium intybus
MTRRCSHCSNNGHNSRTCPNRGLKLFGVRITDGSIRKSASMGNLTHYTGSGSGGGALNSLSGGGGGTDVDSPGDTPDHNAAADGYGSEDFIAGSSSGRERKKGVPWTEEEHRMFLLGLKKLGKGDWRGIARNYVISRTPTQVASHAQKYFIRQTNMSRRKRRSSLFDMVPNDVDPLDTVHDGETQSINNPMCVSVPTVEEKQEEEEEECESMDSGSSNMAIGLMQQGYCYPAAMFPAYLSPFIPVAIPFWGGSGPGAKTESHEVLKPTAVHSKSPINVDELVGLSKLSLGESIGDGGANSLKLVGSLSRQSAFHASNNSNPTRSSSSSMGGSGHSPIHAL

SEQ ID NO: 88 - DNA, 1002 bp, Citrus sinensis
atgacgcggcgctgctcgcattgcagccacaacggccacaactctcggacctgccccaaccgcggggtcaagatcttcggggtccgattgaccgacggctcaatccggaagagtgctagtatgggcaatctcagccactacgccggttcgacttcgggtcataataacaataacgcgtcaaacactcctgattcgcccggtgagacgccggatcatcatgctgacgggtatgcgtcggaagatttcgttcccgggtcatcgtcgagtcgcgaacgcaagaaaggtgttccatggactgaagaggagcataggatgtttttacttggtttgcagaagctggggaaaggtgattggcgtggaattgcacgcaattatgttgtatctagaacacctactcaagttgccagccatgctcaaaaatattttatcaggcaaagcaatgtgtctaggagaaaaagacggtccagcctatttgatattgttgcagatgaaccactcgacactccagctgcatcacaggacttgttttctgccaaccatacgcagggtgaaacacaaagtaacaacccactgcctgctcctcctgctttggatgaagaatgtgaatcaatggattctaccaactccaatgatggagagccggcccctccaaagccggaaaactcacagtcctgtatcccaatggtgtatcctgctgcttatgtctcaccattctttccatttacttatccatattggtcggcgtacaacacagagccaacacagaaggaaacacatgaagtgctgaagcctacagcagtacattcaaagagtcctataaatgttgatgaactggttggcatgtcgaaactgagtttgggagaatctattggtcagaatggtccatcttctctctcattgaaacttgatgaagggtcgtctaggcagtcagccttccatgctaatccagcctctggcagcactggaatgaattcaagcggcagtcctattcatgcactctaa

SEQ ID NO: 89 - protein, 333 aa, Citrus sinensis
MTRRCSHCSHNGHNSRTCPNRGVKIFGVRLTDGSIRKSASMGNLSHYAGSTSGHNNNNASNTPDSPGETPDHHADGYASEDFVPGSSSSRERKKGVPWTEEEHRMFLLGLQKLGKGDWRGIARNYVVSRTPTQVASHAQKYFIRQSNVSRRKRRSSLFDIVADEPLDTPAASQDLFSANHTQGETQSNNPLPAPPALDEECESMDSTNSNDGEPAPPKPENSQSCIPMVYPAAYVSPFFPFTYPYWSAYNTEPTQKETHEVLKPTAVHSKSPINVDELVGMSKLSLGESIGQNGPSSLSLKLDEGSSRQSAFHANPASGSTGMNSSGSPIHAL

SEQ ID NO: 90 - DNA, 1074 bp, Citrus sinensis
atgacgcggcgctgctcgcattgcagcaacaacgggcacaactcgcgaacgtgtcccacgcggggcggcggctcgtcgccgggcgtgggcggcctgaagttgtttggcgtccggcttacggatggctcgataatcaagaagagcgcgagcatggggaacttatcggcgttgcactaccatagctcctcgtcggcagccgcttcgccgaatcctgactccccgttatcggatcacgtgcgtgacccgactcacttgaccgaaggttacttgtcggatgacccagcgcacgggtctggttcatcgaatcggcgttgcgagagaaagaaaggtgtcccatggacagaagaggagcatcgcctgtttctaattggccttcagaaattagggaagggagactggcgtggtatagcacgaaattatgtcatgtccaggactccaacccaggtggcaagtcatgctcagaagtattttatccggcagagtaatgctactcgaagaaagaggcgctccagtctttttgacatggttgcggatgatatggccacagataccccactggtgccagaagagcaaataatgcttccatctcctcttgccagagaatctgacaatacaagctcacaaccttctctaaatctttctctgagtaccgaatttgaacccatggaagccgtatgtaaagaaacagagaaggattctgaagaacctgtgattgatttgaatgagttcaccccaatggtttccagtttcttcccagcatatatgccagtcccttatacatattggccacataatgcagccactggggaagaagataaggatgcagggacttctggtaatcatccgatccttaagccaattccaatccttcctaaagaacccgtcaatgtagatcaactagttggcatgtctcaactgagtataggagagactgaaagaggcctcagagagccttcacctctttccttgaaactactgggagagccgtcgaggcagtcagctttccacgcaaatgccccagtcagcaggtcggatttaagcaagggcaagacgaccccaatacaagcagtttga

SEQ ID NO: 91 - protein, 357 aa, Citrus sinensis
MTRRCSHCSNNGHNSRTCPTRGGGSSPGVGGLKLFGVRLTDGSIIKKSASMGNLSALHYHSSSSAAASPNPDSPLSDHVRDPTHLTEGYLSDDPAHGSGSSNRRCERKKGVPWTEEEHRLFLIGLQKLGKGDWRGIARNYVMSRTPTQVASHAQKYFIRQSNATRRKRRSSLFDMVADDMATDTPLVPEEQIMLPSPLARESDNTSSQPSLNLSLSTEFEPMEAVCKETEKDSEEPVIDLNEFTPMVSSFFPAYMPVPYTYWPHNAATGEEDKDAGTSGNHPILKPIPILPKEPVNVDQLVGMSQLSIGETERGLREPSPLSLKLLGEPSRQSAFHANAPVSRSDLSKGKTTPIQAV

SEQ ID NO: 92 - DNA, 621 bp, Centaurea solstitialis
atgacgagaaggtgttctcattgcggtaacaatgggcacaactcaagaacttgccctaatcgaggtttgaagctatttggggtccgaattaccgatggatcgatccgaaagagtgctagtatgggtaacttgacccactatactggatccggtaactttttgaatgggttttccggcggcggcggcgccgccgccggaaccgacgttgattcgccgggagacacgccggatcataacgccgccggtgatggatacgggtcggaggattttgtggccgggtcgtcatcaagccgtgaaaggaaaaaaggtgttccgtggacggaggaagaacatcggatgtttctattaggtttacaaaagctcgggaaaggcgattggcgtggaatagcgagaaactacatgatctcgagaacaccgactcaagtcgcgagccatgcccaaaaatatttcatccggcaaagcaatatgtcgaggagaaaaagacgatctagcctcttcgatatcgtagccgatgattcgccagacatgcacatggtttcgtcgcttgattaccctcccgggaacccgtcacaaccggaggcccaatctgtcaacaacccgttgaccatcccgaccctctag

SEQ ID NO: 93 - protein, 206 aa, Centaurea solstitialis
MTRRCSHCGNNGHNSRTCPNRGLKLFGVRITDGSIRKSASMGNLTHYTGSGNFLNGFSGGGGAAAGTDVDSPGDTPDHNAAGDGYGSEDFVAGSSSSRERKKGVPWTEEEHRMFLLGLQKLGKGDWRGIARNYMISRTPTQVASHAQKYFIRQSNMSRRKRRSSLFDIVADDSPDMHMVSSLDYPPGNPSQPEAQSVNNPLTIPTL

SEQ ID NO: 94 - DNA, 1002 bp, Citrus paradisi x Poncirus trifoliata
atgacgcggcgctgctcgcattgcagccacaacggccacaactctcggacctgccccaaccgcggggtcaagatcttcggggtccgattgaccgacggctcaatccggaagagtgctagtatgggcaatctcagccactacgccggttcgacttcgggtcataataacaataacgcgtcaaacactcctggttcgcccggtgagacgccggatcatcatgctgacgggtatgcgtcggaagatttcgttcccgggtcatcgtcgagtcgcgaacgcaagaaaggtgttccatggactgaagaggagcataggatgtttttacttggtttgcaaaagctggggaaaggtgattggcgtggaattgcacgcaattatgttgtatctagaacacctactcaagttgccagccatgctcagaaatattttatcaggcaaagcaatgtgtctaggagaaaaagacgatccagcctatttgatattgttgcagatgaaccactcgacactccagctgcatcacaggacttgttttctgccaaccatacacagggtgaaacacaaagcaacaacccactgcctgctcctcctgctttggatgaagaatgtgaatcaatggattctaccaactccaatgatggagagccggcccctccaaagccggaaaactcacagtccattatcccaatggtgtatcctgctgcttatgtctcaccattctttccatttacttatccatactggtcggcgtacaacacagagccaacacagaaggaaacacatgaagtgctgaagcctacagcagtacattcaaagagtcctatgaatgttgatgaactggttggcatgtcgaaactgagtttgggagaatctattggtcagaatggtccatcttctctctcattgaaacttgatgaagggtcgtctaggcagtcagccttccatgctaatccagcctctggcagctctggaatgaattcaagcagcagtcctattcatgcactctaa

SEQ ID NO: 95 - protein, 333 aa, Citrus paradisi x Poncirus trifoliata
MTRRCSHCSHNGHNSRTCPNRGVKIFGVRLTDGSIRKSASMGNLSHYAGSTSGHNNNNASNTPGSPGETPDHHADGYASEDFVPGSSSSRERKKGVPWTEEEHRMFLLGLQKLGKGDWRGIARNYVVSRTPTQVASHAQKYFIRQSNVSRRKRRSSLFDIVADEPLDTPAASQDLFSANHTQGETQSNNPLPAPPALDEECESMDSTNSNDGEPAPPKPENSQSIIPMVYPAAYVSPFFPFTYPYWSAYNTEPTQKETHEVLKPTAVHSKSPMNVDELVGMSKLSLGESIGQNGPSSLSLKLDEGSSRQSAFHANPASGSSGMNSSSSPIHAL

SEQ ID NO: 96 - DNA, 774 bp, Gossypium hirsutum
atgagtaacttatcccaattcgccgggtccaattctgccgggcataacgggaatgggtcgggttcgcccggtgaaggtccggatcacgccgatggttatgcttccgaggattttgtccctggatcgtcttcgagtcgtgataggaaaaaaggtgttccatggactgaagaggagcatcgtatgtttctacttggactgcaaaaacttgggaaaggtgattggcgtggaatctctcgcaattatgttatatcaaggactcctactcaagtggctagccatgctcagaaatatttcatcaggcagtccaacgtttctaggagaaaaagacgttccagcctttttgatattgtagcagatgaatcgggtgacacaccaatggtatcaccggatttgttcactgcaaaccacccactggatgaaacgcagagcactgacccgttgcctattcctcctccattggatgaagacgacgaatcaatggattccaacaactcaaatgatggggaaccagttcctcatccaacatcggagatctccgaaccctgttacccagtagtatatcctgcttacttcccaccattctatccattttcatttccatattggatgggttacaacacagaaccaaccaagaccgacacgcatgaagtggtgaagccaacagcagtacattcaaagagcccgatcaacgtggatgagctggtgggcatgtcgaaactgagcttgggagaatctatcggtgataatggccctgttgtctcgtcctctgcctga

SEQ ID NO: 97 - protein, 257 aa, Gossypium hirsutum
MSNLSQFAGSNSAGHNGNGSGSPGEGPDHADGYASEDFVPGSSSSRDRKKGVPWTEEEHRMFLLGLQKLGKGDWRGISRNYVISRTPTQVASHAQKYFIRQSNVSRRKRRSSLFDIVADESGDTPMVSPDLFTANHPLDETQSTDPLPIPPPLDEDDESMDSNNSNDGEPVPHPTSEISEPCYPVVYPAYFPPFYPFSFPYWMGYNTEPTKTDTHEVVKPTAVHSKSPINVDELVGMSKLSLGESIGDNGPVVSSSA

SEQ ID NO: 98 - DNA, 987 bp, Gossypium hirsutum
atgacgcgtcgctgctcacattgcagccacaacggccacaactctcggacatgtcccaaccgaggggtcaaactcttcggagtccgcttgactgacgggtcgattcggaagagcgccagtatgggcaacttaagccaatattccgggtcgaattctggcgcgcataacgggaacgggtcgggttcgcccggtgagggtccggatcacaccgatggttatgcttctgaggatttcgtccccgggtcgtcttcgagtcgtgaaaggaaaaaaggtgttccttggacagaagaggagcataggatgtttctccttggtctgcagaagcttgggaaaggtgattggcgtggaatctcgcgcaattatgttatatcaaggactcctactcaagtggctagccatgctcagaaatatttcatcaggcagtccaatgtttctaggagaaaaagacgttctagcctctttgatatcgtagcagatgaatcaagtgacactccaatggcatcacaggatttgttttctgctaaccatccacatgctgaaacacagagtaatgaccagttgagtattccacctacattggatgaagaagataaaccaatggattccaacaactcgaatgatggggaaactgtacctccaaagtcagagagctcacaaccctgttacccagtagtatatcctacttacttcccaccattttttccatattcattaccatattggatggggtatgacacagaaccaacgaagaaggacacgcatgaagtggtgaagccaacagcagtacattcaaagagcccgatcaatgttgatgagctggtgggaatgtcaaagttgagtttgggagaaagtattggtgatagcggttcatcatctcgttcattaaaacttgatggttcatttaggcagtttgcttttcatgccaatcctgcttcatttggtaattttaacatggattcaagtgggaacccaatccatgcggtttaa

SEQ ID NO: 99 - protein, 328 aa, Gossypium hirsutum
MTRRCSHCSHNGHNSRTCPNRGVKLFGVRLTDGSIRKSASMGNLSQYSGSNSGAHNGNGSGSPGEGPDHTDGYASEDFVPGSSSSRERKKGVPWTEEEHRMFLLGLQKLGKGDWRGISRNYVISRTPTQVASHAQKYFIRQSNVSRRKRRSSLFDIVADESSDTPMASQDLFSANHPHAETQSNDQLSIPPTLDEEDKPMDSNNSNDGETVPPKSESSQPCYPVVYPTYFPPFFPYSLPYWMGYDTEPTKKDTHEVVKPTAVHSKSPINVDELVGMSKLSLGESIGDSGSSSRSLKLDGSFRQFAFHANPASFGNFNMDSSGNPIHAV

SEQ ID NO: 100 - DNA, 1002 bp, Glycine max
atgacgcggcgttgctcgcattgcagccacaatgggcacaactccagaacctgccctaaccgcggggttaagctcttcggggtccgattaaccgacgggtcgatccggaagagcgccagcatgggcaacctaacccactacgctggttccgggtcggccccgctccatgtcgggttgaataacccgggttcacccggggagacgcccgatcacgccgccgccgccgccgacggctacgcctccgaggacttcgttcccgggtcttcttctagctcccgtgaaagaaagaagggtgttccatggactgaggaggaacatagaatgtttttgctcggattgcagaagctgggcaaaggtgattggcgtggaattgcaaggaactatgttatatcaaggacgcctactcaagtggccagccatgctcagaaatatttcatcaggcaaagcaatgtgtccaggcgaaaaagacggtccagcttgtttgatattgttgcagatgaagcagctgacactgcaatggtacagcaagacttcttgtctgctaatgagttaccaactgaaacagaaggcaataaccccttgcctgctcctcctcccctcgatgaagagtgtgaatcaatggattccacaaactcaaatgatggagagcctgccccatcaaagccagaaaacacacatccatcttatcctatgttatatcctgcgtattattctccagtgttcccgtttcctctgccctattggtcaggatacagtccagagcccaccaagaaggaggaaacacatgaagtgctgaaaccaactgcagtacattctaaaagccctatcaatgttgatgaactggttggcatatcaaaactgagtttaggggagtctattggtgactcgggtccctccaccctgtctcgaaaacttattgaagaaggaccctctagacaatcagcttttcatgcaacaccaacatgtggtgatatgaatggcagtgccatccatgcagtttaa

SEQ ID NO: 101 - protein, 333 aa, Glycine max
MTRRCSHCSHNGHNSRTCPNRGVKLFGVRLTDGSIRKSASMGNLTHYAGSGSAPLHVGLNNPGSPGETPDHAAAAADGYASEDFVPGSSSSSRERKKGVPWTEEEHRMFLLGLQKLGKGDWRGIARNYVISRTPTQVASHAQKYFIRQSNVSRRKRRSSLFDIVADEAADTAMVQQDFLSANELPTETEGNNPLPAPPPLDEECESMDSTNSNDGEPAPSKPENTHPSYPMLYPAYYSPVFPFPLPYWSGYSPEPTKKEETHEVLKPTAVHSKSPINVDELVGISKLSLGESIGDSGPSTLSRKLIEEGPSRQSAFHATPTCGDMNGSAIHAV

SEQ ID NO: 102 - DNA, 1083 bp, Glycine max
atgactcggcgctgctcccactgcaccaacaacggccacaactcccggacatgcccgtcgcggggagggggcggcgtcaagctgttcggggtgaggctgacggatggatcaatcataaagaagagcgctagcatggggaaccttaacctctcctcctcctcctcctccgccgccgccgcacatctgcaattccgttcatctccttcttcttccaacctccccgcggcctcatcgcccaatccaagctccccgtgctccgacccgccccaaggctacttgtccgatgaccccgcccacgtctccaccttcgctaaccgccgcggtgatagaaaaaaaggtgtgccatggactgaagaagaacatcggctgttcttaattggtctccagaagctgggcaaaggagactggcgtgggatagcacgtaattttgttgtatcaagaacccctactcaagtagcaagtcatgcccaaaagtattttatccggcagagtcatgctaccaggagaaagagacgttccagcctttttgacatggttccagatatgtcttcagatcaaccttctgtgccagaagaacaagtgctgcttccacctcccgagaactcacaaccttgcaatggaaaatcacagccttcattaaatctctccctcaaatcagaatttgaacctatggagactacttctcaagaaaatgtgcaacagaccaatgaacctatgatgggatcaaacagattgacaccaatggctcctcatggatgctttcccgcatatttacctgttccttttcccgtgtggccatcaacttgggttcacccctttgaagaagttaagggaggagagacatgccaccatcagatccacaagccaatcccagtcattccaaaggaacctgttaatgttgacgaacttgtgggaatgtctcatctaagcattggggaagcacaggtacgtgatagagagccttcccctctttccataaagttgttaggagagccctcaaggcagtcagcattccatgcaaatgtcccggttggtagttcggatttaaacaatggcaaggacaacgcaattcaagctgtctga

SEQ ID NO: 103 - protein, 360 aa, Glycine max
MTRRCSHCTNNGHNSRTCPSRGGGGVKLFGVRLTDGSIIKKSASMGNLNLSSSSSSAAAAHLQFRSSPSSSNLPAASSPNPSSPCSDPPQGYLSDDPAHVSTFANRRGDRKKGVPWTEEEHRLFLIGLQKLGKGDWRGIARNFVVSRTPTQVASHAQKYFIRQSHATRRKRRSSLFDMVPDMSSDQPSVPEEQVLLPPPENSQPCNGKSQPSLNLSLKSEFEPMETTSQENVQQTNEPMMGSNRLTPMAPHGCFPAYLPVPFPVWPSTWVHPFEEVKGGETCHHQIHKPIPVIPKEPVNVDELVGMSHLSIGEAQVRDREPSPLSIKLLGEPSRQSAFHANVPVGSSDLNNGKDNAIQAV

SEQ ID NO: 104 - DNA, 1071 bp, Glycine max
atgactcggcgttgctcccactgcagcaacaacggccacaattcccggacatgcccttcgcgtgggggcggaggtgtgaagcttttcggggtcaggctgacggatggatcaatcattaagaagagcgccagcatgggcaacctaaacctctcctccgccgccgcacatcaccaattccattcatctccttcttcttccaacctcgccgccgccccctcatcccccaatccaagctccccatgctccgaccctccccaaggttacttgtccgatgaccccgcccatgtctccaccttcgctaaccgccgcggtgatagaaaaaaaggtgttccatggactgaagaagaacatcggctgttcttaattggtctccagaagctaggcaaaggagactggcgtgggatagcacgcaattttgttgtatcaaggacccctactcaagtagcaagtcatgcccagaagtattttatccggcagagtcatgctaccaggagaaagagacgttccagtctttttgacatggttccagatatgtcttcagatcaaccttctgtgccagaagaacaagtgttgcttccaccttcccagaactcacaaccttgcaatggaaaatcacagccttcattaaatctctccctcaaatcagaatttgaacccatggagactacttctcaagaaaatgcgcaacagaccaatgaaactatgatgggatcaatcggactgacaccaatggctcctcatggattctttcctgcatatttacctgttccatttcccatgtggccatcaactgtggctcccccgtttgaagaagttaagggaggagagacatcccaccatcagatccacaagccaatcccagtcattcccaaggaacctgttaatgttgacgaacttgtgggaatgtctcatctaagcattggggaagcaaaggtacgtgatagagagccttcccctctttccttaaagttgttaggagagccctcaaggcagtcagcattccatgcaaatgctccagttggtacttcggatttaaacaatggcaaggacaacgcaattcaagctgtctga

SEQ ID NO: 105 - protein, 356 aa, Glycine max
MTRRCSHCSNNGHNSRTCPSRGGGGVKLFGVRLTDGSIIKKSASMGNLNLSSAAAHHQFHSSPSSSNLAAAPSSPNPSSPCSDPPQGYLSDDPAHVSTFANRRGDRKKGVPWTEEEHRLFLIGLQKLGKGDWRGIARNFVVSRTPTQVASHAQKYFIRQSHATRRKRRSSLFDMVPDMSSDQPSVPEEQVLLPPSQNSQPCNGKSQPSLNLSLKSEFEPMETTSQENAQQTNETMMGSIGLTPMAPHGFFPAYLPVPFPMWPSTVAPPFEEVKGGETSHHQIHKPIPVIPKEPVNVDELVGMSHLSIGEAKVRDREPSPLSLKLLGEPSRQSAFHANAPVGTSDLNNGKDNAIQAV

SEQ ID NO: 106 - DNA, 1002 bp, Glycine max
atgacgcggcgttgctcgcattgcagccacaatgggcacaactcaagaacttgccctaaccgcggggtgaagctcttcggggtccgattaaccgatgggtcgatccggaagagtgctagcatgggcaatctaacccactatgccggttccgggtcgggtccactccataccgggttgaataaccccggttcgcccggggaaacccccgatcatgccgccgcagtcgccgacggttacttgtccgaggacttcgttcccgggtcttcttctagctcccgtgaaagaaagaagggtgttccatggactgaggaggaacatagaatgtttttactcggattgcagaagctgggcaaaggtgattggcgtggaattgcaaggacctatgttatatcaaggacacctactcaagtggctagccatgctcagaaatatttcatcaggcagagcaatgtgtccaggcggaaaagacggtccagcttgtttgatattgttgcagatgaagcagctgacactgcaatggtacagcaagacttcttgtctgctaatcagttacccactgaaacagaaggcaataaccccttgccagctcctcctcccctcgacgaagagtgcgaatccatggattccacaaactcaaatgatggagagcctgccccatcaaagccagaaaacacacagtcatcttatccaatgttatatcctgcatattattctccggtgttcccgtttcctctgccctattggtcaggatacagtccagagtccaccaagaaggaggagacacatgaagtactgaagccaactgcagttcattctaaaagccctatcaatgttgatgaactggttggcatttcaaaattgagtttaggggagtctattggtgactctggtccctcctctctgtctcgaaaacttatcgaagaaggaccctctagacagtcagcttttcatgcaacaccgacatgtggcagttcaaatggcagtgccatccatgcagtttaa

SEQ ID NO: 107 - protein, 333 aa, Glycine max
MTRRCSHCSHNGHNSRTCPNRGVKLFGVRLTDGSIRKSASMGNLTHYAGSGSGPLHTGLNNPGSPGETPDHAAAVADGYLSEDFVPGSSSSSRERKKGVPWTEEEHRMFLLGLQKLGKGDWRGIARTYVISRTPTQVASHAQKYFIRQSNVSRRKRRSSLFDIVADEAADTAMVQQDFLSANQLPTETEGNNPLPAPPPLDEECESMDSTNSNDGEPAPSKPENTQSSYPMLYPAYYSPVFPFPLPYWSGYSPESTKKEETHEVLKPTAVHSKSPINVDELVGISKLSLGESIGDSGPSSLSRKLIEEGPSRQSAFHATPTCGSSNGSAIHAV

SEQ ID NO: 108 - DNA, 975 bp, Gossypium raimondii
atgacgcgtcgctgctcgcattgcagccacaacgggcacaactccagaacctgcccgaatcgtggtgtcaagttgttcggagttcggttgactgacgggttggttcggaagagtgccagtatgagtaacttatcccaattcgccgggtccaattctgccgggcataacgggaatgggtcgggttcgcccggtgaaggtccggatcacgccgatggttatgcttccgaggattttgtccctggatcgtcttcgagtcgtgataggaaaaaaggtgttccatggactgaagaggagcatcggatgtttctacttggactgcaaaaacttgggaaaggtgattggcgtggaatctctcgcaattacgttatatcaaggactcctactcaagtggctagccatgctcagaaatatttcatcaggcagtccaacgtttctaggagaaaaagacgttccagcctttttgatattgtagcagatgaatcgggtgacacaccaatggtatcaccggatttgttcactgcaaaccacccactggatgaaacgcagagcactgaccagttgcctattcctcctccattggatgaagaagacgaatcaatggattccaacaactcaaatgatggggaaccagttcctcatccaacatcggagatctccgaaccctgttacccagtagtatatcctgcttacttcccaccattctatccattttcatttccatattggatgggttacaacacagaaccaaccaagaccgacacgcatgaagtggtgaagccaacagcagtacattcaaagagcccgatcaacgtggatgagctggtgggcatgtcgaaactgagcttgggagaatctatcggtgataatggcccatcctcactttcattgaaacttgatggttcatccagacagtctgcattccatgccaatccgtcgtcacgtaattcaagtgggagtccaatccatgcagtttag

SEQ ID NO: 109 - protein, 324 aa, Gossypium raimondii
MTRRCSHCSHNGHNSRTCPNRGVKLFGVRLTDGLVRKSASMSNLSQFAGSNSAGHNGNGSGSPGEGPDHADGYASEDFVPGSSSSRDRKKGVPWTEEEHRMFLLGLQKLGKGDWRGISRNYVISRTPTQVASHAQKYFIRQSNVSRRKRRSSLFDIVADESGDTPMVSPDLFTANHPLDETQSTDQLPIPPPLDEEDESMDSNNSNDGEPVPHPTSEISEPCYPVVYPAYFPPFYPFSFPYWMGYNTEPTKTDTHEVVKPTAVHSKSPINVDELVGMSKLSLGESIGDNGPSSLSLKLDGSSRQSAFHANPSSRNSSGSPIHAV

SEQ ID NO: 110 - DNA, 633 bp, Hordeum vulgare
atggcctactggacagtcaatccgctcctctcctctcctctccgctgctctcaccaccaccaccaccacaccgccaccacacttcgcttctcctcccagcccacctctcctctccccttccggcgcgctacaccggcgggtgcgctggcggctccggggatgacgaggcggtgctcgcactgcagctacaacggccacaactcgcggacgtgccccaaccgcggggtcaagatcttcggggtgcgcctcaccgatggatccatccgcaagagcgccagcatggggaacctctccctgctcggaggatccaccagcggcggcggcggcgcgtcccccgctgacgtcggccacgacgccgccgcggagggctacgcctccgacgacttcgtgcagggatcatcatccgccaaccgcgagcgcaagaaaggggttccttggactgaagaagaacaccggaggtttttgcttggattgcaaaaacttggaaaaggtgattggcgaggaatctctcgtaattttgtggtctcaagaacacctactcaagtagcaagtcatgctcagaaatattttatacgccaagccaatatgagcagaaggaagagaaggtctagcctctttgattttggtgcctga

SEQ ID NO: 111 - protein, 210 aa, Hordeum vulgare
MAYWTVNPLLSSPLRCSHHHHHHTATTLRFSSQPTSPLPFRRATPAGALAAPGMTRRCSHCSYNGHNSRTCPNRGVKIFGVRLTDGSIRKSASMGNLSLLGGSTSGGGGASPADVGHDAAAEGYASDDFVQGSSSANRERKKGVPWTEEEHRRFLLGLQKLGKGDWRGISRNFVVSRTPTQVASHAQKYFIRQANMSRRKRRSSLFDFGA

SEQ ID NO: 112 - DNA, 1173 bp, Hordeum vulgare
atgacgcgggacggcgtgccaccggcggcgcctgccggcggcggtgctggggacgggccgaggcgatgcgggcagtgcgggcaccacgggcacaacgcacgcacgtgcacagcgcgccccgtgaagctcttcggcgtgcgcatcggcgacaagccaatcaggaagagcgtcagcatgggcaacctcgcgcagctcgccgagggcagcggcggtgccagggccgaggggtacggctccgagggcgacgacgacaaaccccacaggaagcgaggtgagtcatggtcagaagaggagcacaaaaattttctacttggattgaataaattaggaaaaggtgattggcgtggcatatcccgtaattatggtgtctcgagaacgcctactcaagttgctagccatgctcagaagtatttcattcgccaaacaaatgttaataggagaaagagaagatcaagcctcttcgatatggttattgaggatcctggtgaccagtcactctcccgttcatcgtcacaagagatgccgctctcccgttcatcttcacaagatgtagaagagttggtagatgatctacggcctgttactgctcctgtgacaccacccgctcctatgcccgtgataacatctgtttcagtccggccaccaatgccaggaatggcaccgcctgctcctgtgcctatgctaacatatgcatccgccccgtcaccagttctagcaatgacacatcaacctcagggcaatgaatcggttggttcaagctcaactgctggagaagcagggatggtgatgccacaagtgatgccctcatatgcttatcctcccatgatgattcctgcacctcactatgtccaagcagtttttccgtttccatactatagctatgctccagtgttctatgggccgccagtctctatgcaagcatcatcatcaggtacagtacaagtatcacatgagcctgtcaggcctgttgccgtccactcagttcccccggtaaatgtcgaagacctgtacaacatgtcccaactgaacctgaagggtgactcaagtagcaatggtgttgcgcctaacttgccgttgcctccaaatccgaatgggagaccagagaggcaatctgctttccatggaaaagggcctgggaacggctcatcaaacggaccaataccgacaaaatga

SEQ ID NO: 113 - protein, 390 aa, Hordeum vulgare
MTRDGVPPAAPAGGGAGDGPRRCGQCGHHGHNARTCTARPVKLFGVRIGDKPIRKSVSMGNLAQLAEGSGGARAEGYGSEGDDDKPHRKRGESWSEEEHKNFLLGLNKLGKGDWRGISRNYGVSRTPTQVASHAQKYFIRQTNVNRRKRRSSLFDMVIEDPGDQSLSRSSSQEMPLSRSSSQDVEELVDDLRPVTAPVTPPAPMPVITSVSVRPPMPGMAPPAPVPMLTYASAPSPVLAMTHQPQGNESVGSSSTAGEAGMVMPQVMPSYAYPPMMIPAPHYVQAVFPFPYYSYAPVFYGPPVSMQASSSGTVQVSHEPVRPVAVHSVPPVNVEDLYNMSQLNLKGDSSSNGVAPNLPLPPNPNGRPERQSAFHGKGPGNGSSNGPIPTK

SEQ ID NO: 114 - DNA, 504 bp, Lactuca sativa
atggattttccggtggcggcggcggcaccgaccttgattcgccaggagataccccggatcataacgccgccggtgacggctacggctcggaggatttcgttgccggctcgtcttcaagccgtgaaaggaaaaaaaggcgttccatggacggaggaagaacatcggatgttcttattaggtttacagaagctcggaaaaggggattggcgaggaatcgcgagaaactatgtgattacacgaacaccaactcaagtcgcaagtcatgctcagaaatttttcatcagacaaagcaatatctcaagaagaaaaagacgatccagccttttcgacatcgtcgccgacgatttcccgtcgcaaccggagactcaatcagtcaaaaacccattaaccatcccgactctagaagaagaagaatgcgagtcgatggattccgctaactcacccaccgcagatccccaaatcgaccccacaccaaacactggcactgtaagtgtaaatctctag

SEQ ID NO: 115 - protein, 167 aa, Lactuca sativa
MDFPVAAAAPTLIRQEIPRIITPPVTATARRISLPARLQAVKGKKGVPWTEEEHRMFLLGLQKLGKGDWRGIARNYVITRTPTQVASHAQKFFIRQSNISRRKRRSSLFDIVADDFPSQPETQSVKNPLTIPTLEEEECESMDSANSPTADPQIDPTPNTGTVSVNL

SEQ ID NO: 116 - DNA, 1026 bp, Mesembryanthemum crystallinum
atgactcggcggtgctcccattgcagccacaatgggcacaactctcggacctgcccgaaccggggggtcaagctctttggggtccgattaaccgacggatcaatccgaaagagtgctagtatgggcaatctcagtcactatcaccaaaacggcgccgttgggagcaccacacctgggtctcccgccggcgatcatacccccgaccatggtggctccgccgctggcgatggctacggctctgaggatttcgtacctgggtcctcttctagccgtgagcgtaaaaaaggtgttccatggactgaggaggaacaccgaatgtttctgcttggactgcaaaagcttgggaaaggcgattggcggggaatatctcgtaattatgtaatatcgaggacacccactcaagtggccagccatgctcaaaaatattttatcaggcaaagcaacgtgtccagaaggaaaaggcggtccagcttgtttgatattatagctgatgagtcgggcgatacaccaatggtgtcacatgatttcctttctgcgcactcagcagagaatgatacagagaatagcaatccattgccccctgctccagcgctcgatgaagaatgcgaatctatggcatctagcaactccaatgaggtggaacctactctacctaaaccggaaacctcacaaagctgctatccaagtgatactccccagaactattatcccgttgtatatccaacatatgttcctccattttttccctacgccattccattttggacagactctaatcccgagccagccaaggagacacatgaggtggtgaagcctaccgcagttcattcaaaagacccgatcaatgttgacgagttggttggcatgtcgaaactcagcttgggggaaaccattggtggtggtgagccatcaagtttgtcgctaaaattgcttgacggctcgtctagacaatcggcttttcatgctaatccggcccctagcagttcaggtatgaactctaatggcagtccaatccatgcagtctga

SEQ ID NO: 117 - protein, 341 aa, Mesembryanthemum crystallinum
MTRRCSHCSHNGHNSRTCPNRGVKLFGVRLTDGSIRKSASMGNLSHYHQNGAVGSTTPGSPAGDHTPDHGGSAAGDGYGSEDFVPGSSSSRERKKGVPWTEEEHRMFLLGLQKLGKGDWRGISRNYVISRTPTQVASHAQKYFIRQSNVSRRKRRSSLFDIIADESGDTPMVSHDFLSAHSAENDTENSNPLPPAPALDEECESMASSNSNEVEPTLPKPETSQSCYPSDTPQNYYPVVYPTYVPPFFPYAIPFWTDSNPEPAKETHEVVKPTAVHSKDPINVDELVGMSKLSLGETIGGGEPSSLSLKLLDGSSRQSAFHANPAPSSSGMNSNGSPIHAV

SEQ ID NO: 118 - DNA, 1056 bp, Malus domestica
atgactcggcggtgctcgcactgcagcaacaacgggcacaactcgcgcacgtgcccgacgcgtgtcgggtcctcctcctcctccccctccttaggaggcggcgtgaagctgttcggcgtgaggctcaccgatggctcgatcattaagaagagcgccagcatgggaaatttatccagtgcggcggcgcactaccattcctcgtcgccgaacccggactccccgagctccgaccagctccatgacccggttcacgttcccgacggttacttatccgacgaccccgcccacgcttcttcctccgtcaatcgccgcggcgatcgtaaaaaaggaacgccatggacagaagaggagcatcgaatgttcttgattggtctccagaaattggggaagggagactggcgtgggatagcacggagttatgtgacgactaggactcccacccaggtggcaagccatgcccagaagtattttatccgacagagtaatgctacacgaagaaagaggcggtccagcctattcgacatggttcccgatatggcacctcccttgccagaagaacaaatttttcttccttcttcttgggaaggagattctgaagatgcaaactcactaccttcattaaatctttccctcagctcagagagcaaacccatggaaaccacacatgaagaaactgtaatagaacatgatcacgagcctgcaatgggatcaaatggtttcccgccaatggctccaccttacgtcccagcttatatgtcctacccctggccatattgggcaccaagtgcagggccctttagagaaatggttggtgagccctctcgccaaccagtcttaaggccaattcctatcgttcctaaggagcctgtcaatgtggatgcgctgggcatgtctcagctcagtctaggagagacggagagaggattgaaggagccatcgcctctctccttaaaactacttggagagccgtcaaggcagtcggcattccacccgaatgctccagctagtgagccggacttgagcaaaggcaagagcagtgcgatccaagcagtctga

SEQ ID NO: 119 - protein, 351 aa, Malus domestica
MTRRCSHCSNNGHNSRTCPTRVGSSSSSPSLGGGVKLFGVRLTDGSIIKKSASMGNLSSAAAHYHSSSPNPDSPSSDQLHDPVHVPDGYLSDDPAHASSSVNRRGDRKKGTPWTEEEHRMFLIGLQKLGKGDWRGIARSYVTTRTPTQVASHAQKYFIRQSNATRRKRRSSLFDMVPDMAPPLPEEQIFLPSSWEGDSEDANSLPSLNLSLSSESKPMETTHEETVIEHDHEPAMGSNGFPPMAPPYVPAYMSYPWPYWAPSAGPFREMVGEPSRQPVLRPIPIVPKEPVNVDALGMSQLSLGETERGLKEPSPLSLKLLGEPSRQSAFHPNAPASEPDLSKGKSSAIQAV

SEQ ID NO: 120 - DNA, 1008 bp, Manihot esculenta
atgactaggcggtgctcgcattgcagccacaacgggcacaactcgcggacctgccctaaccgcggggtcaagctcttcggggtgagattgaccgatgggtcgatcaggaaaagtgctagtatgggcaatttaagccattacactgggtctctcagccacgcttccgggtccaacaacccgggatcaccaggaggagagacacccgaccacggtggcactgctgacggctacgcttctgaggatttcgttcctggttcttcttcgagccgtgagcgaaagaaaggtgttccatggaccgaagaggagcataggatgtttctacttggtttgcagaagcttggcaaaggtgattggcgtggaattgcacgcaattatgttatatcaaggacacctactcaggtggccagtcatgcgcaaaaatatttcatcaggcaaagcaatgtttctaggaggaaacgacgatccagcctatttgatatagtggctgatgaaccagccgacactccaatggcttcacaagagttcttgactgtcaacgatctccaggttgaaacacaaactgatagtcctgatcctttacccgctcctcctcctttggatgaagaatgtgaatcaatggattctaacaactccaatgaggcagaagctgttcctccaaatccaaagccagatagctcacagtctttctacccagttatgtaccctgcttatttcccaccattcttcccattttcatttccactttggtcagggtatggtggggagccaagtaaaaaggagacgcatgaggttgtgaagccaacagcagtacattcaaaaagcccaatcaacgttgatgagctagttggcatgtcaaaactgagtttaggagaatctattggtgacactggcccttctctttccttaaaattggttgaaggatcatccagacaatctgctttccatgccaatacaagctccaattcttcaaacatgaactcaagcagcagtcccatccatgcagtttaa

SEQ ID NO: 121 - protein, 1526 aa, Manihot esculenta
MTRRCSHCSHNGHNSRTCPNRGVKLFGVRLTDGSIRKSASMGNLSHYTGSLSHASGSNNPGSPGGETPDHGGTADGYASEDFVPGSSSSRERKKGVPWTEEEHRMFLLGLQKLGKGDWRGIARNYVISRTPTQVASHAQKYFIRQSNVSRRKRRSSLFDIVADEPADTPMASQEFLTVNDLQVETQTDSPDPLPAPPPLDEECESMDSNNSNEAEAVPPNPKPDSSQSFYPVMYPAYFPPFFPFSFPLWSGYGGEPSKKETHEVVKPTAVHSKSPINVDELVGMSKLSLGESIGDTGPSLSLKLVEGSSRQSAFHANTSSNSSNMNSSSSPIHAVSEQIDNDNAMETRSIDERSPLYMRPHAATGACTCGCCGTTGCTCCCACTGTGGTCATAATGGGCACAATTCTCGTACGTGTCCCGATCGTTGTCCTGATCGGGGGGTACGGTTATTTGGTGTTCGACTCACAACGAACGATGGTGCAGCGAACATGCGTAAGAGTGTCAGCATGGGCAATTTGACGCATTATGCCAACGCCAGCAACCCTCCATCCACCCCCGAGCATTCGGAGTCCGGAGCTGGTGCTGAGGGATACGTTTCAGACGGCCTCGTGCAGACTTCCAGCAACGCTCGCGAAAGAAAGAAAGGTGTACCGTGGACTGAAGAAGAACACCGCCTCTTTCTTCTTGGGCTCCAGAAACTTGGTAAAGGTGATTGGAGGGGCATATCCAGGAATTTTGTGCAGACTAGGACTCCTACTCAGGTGGCCAGTCACGCTCAAAAATATTTCATCAGACAGAGTAACCTGAACAAAAGGAAGCGTCGTTCAAGCCTCTTCGACATTGTTACGGAGTCGGGTCCGAGGCCAATGGTTGAAGAGCCCCTCTCAAAGAGCCCTGACATGTCTGCTCCCCTCCACCAACTCAGCTTGAGCTCCGGAGCATTGTTCAACCACGGTGCGTTCTTCGAACAACAGGGAATGCCGCAACTGAACAGAGGGCCAGACATGTTTCCTCCGATGGCTCCCATGTCTGGAGTGTCGATGAGAAGTTATCCGATTGGAGCCCATCTCCAACAAGCTATTCCTCTGCCAGTGATGTCTCTGGGAACGGCCGAGCAGACAGGTGAGTCGACTGTCAGCTACGCCGGCGAATCCGTAACGGTACTACCGAGACCTGTGGCAATTTCTGCGGCCAGTGCTTCAGGTCCCGGCAGTGCAGCGTTGGCGGGTCAGTTAGGAATCGGAGGACCAAGTATGTACCCATACCACATATGGCCAGGTATTGCACCTGGGAGCTACAGCAAGCCCATGTCCTCGTCGCCGTCATCGAGTTCGAAGGTGGTGAAGCCAACTGCGTGTCCTGCCAAGATCGATGAAGGATCCGAGATGGCGAAACTCACTCTCGGACCTTCACCGTCAGCGGAGCCGTCGAACCTCACTTTGAAGTTCTCGGGCCACAGCGCGTTCGTCTCCAAGACCTCATTCAACAGCAACAATCTCGGTCCGAGCACTATTAGTGTGGTGTAG

SEQ ID NO: 122 - DNA, 1164 bp, Metrosideros polymorpha
atgactcgccgttgctcccactgtggtcataatgggcacaattctcgtacgtgtcccgatcgttgtcctgatcggggggtacggttatttggtgttcgactcacaacgaacgatggtgcagcgaacatgcgtaagagtgtcagcatgggcaatttgacgcattatgccaacgccagcaaccctccatccacccccgagcattcggagtccggagctggtgctgagggatacgtttcagacggcctcgtgcagacttccagcaacgctcgcgaaagaaagaaaggtgtaccgtggactgaagaagaacaccgcctctttcttcttgggctccagaaacttggtaaaggtgattggaggggcatatccaggaattttgtgcagactaggactcctactcaggtggccagtcacgctcaaaaatatttcatcagacagagtaacctgaacaaaaggaagcgtcgttcaagcctcttcgacattgttacggagtcgggtccgaggccaatggttgaagagcccctctcaaagagccctgacatgtctgctcccctccaccaactcagcttgagctccggagcattgttcaaccacggtgcgttcttcgaacaacagggaatgccgcaactgaacagagggccagacatgtttcctccgatggctcccatgtctggagtgtcgatgagaagttatccgattggagcccatctccaacaagctattcctctgccagtgatgtctctgggaacggccgagcagacaggtgagtcgactgtcagctacgccggcgaatccgtaacggtactaccgagacctgtggcaatttctgcggccagtgcttcaggtcccggcagtgcagcgttggcgggtcagttaggaatcggaggaccaagtatgtacccataccacatatggccaggtattgcacctgggagctacagcaagcccatgtcctcgtcgccgtcatcgagttcgaaggtggtgaagccaactgcgtgtcctgccaagatcgatgaaggatccgagatggcgaaactcactctcggaccttcaccgtcagcggagccgtcgaacctcactttgaagttctcgggccacagcgcgttcgtctccaagacctcattcaacagcaacaatctcggtccgagcactattagtgtggtgtag

SEQ ID NO: 123 - protein, 387 aa, Metrosideros polymorpha
MTRRCSHCGHNGHNSRTCPDRCPDRGVRLFGVRLTTNDGAANMRKSVSMGNLTHYANASNPPSTPEHSESGAGAEGYVSDGLVQTSSNARERKKGVPWTEEEHRLFLLGLQKLGKGDWRGISRNFVQTRTPTQVASHAQKYFIRQSNLNKRKRRSSLFDIVTESGPRPMVEEPLSKSPDMSAPLHQLSLSSGALFNHGAFFEQQGMPQLNRGPDMFPPMAPMSGVSMRSYPIGAHLQQAIPLPVMSLGTAEQTGESTVSYAGESVTVLPRPVAISAASASGPGSAALAGQLGIGGPSMYPYHIWPGIAPGSYSKPMSSSPSSSSKVVKPTACPAKIDEGSEMAKLTLGPSPSAEPSNLTLKFSGHSAFVSKTSFNSNNLGPSTISVV

SEQ ID NO: 124 - DNA, 981 bp, Medicago truncatula
atgacccgtcgttgttctcattgcagccacaatgggcacaactcaagaacctgtccaaatcgtggtgtgaagctgtttggagtaagattaaccgatgggatccggaaaagtgctagtatgggtaatcttagccactatagcgggtccgggtctggacttttgaataccgggtcaaatactcctggttcacctggtgaaaaccctgatcatggtgctgatggctatggttctgaggattttgttcctggttcttcttctacttcccgtgaaagaaaaaagggcactccatggactgaggaggaacatagaatgtttttacttggattgaacaagctgggcaaaggtgattggcgtggaattgccaggaactatgttatatcaaggacacctactcaagtggccagtcacgctcaaaaatatttcatcaggcaaagcaatgtgtctaggcgaaagagacggtccagcctgtttgatattgttgcagatgatgcacctgatacttcaatggtaccgcaagacttcttgtcagctaatcaactacaaactgaaacagaaggcaataaccctttgcctgctcctcctccgctcgatgaagaatgtgaatcgatggattctacaaactcaaacgatggagagtctgcctctgccccattaaagcccgacagcaatgcacaagcgtcggcttacccagtagtatatccggcatattattctccattcttcccttttcctcttccctattggtctggatacagtcctgagccggctcctaagaaagaaacacatgaagtggtgaagccaaccccagtacattccaagagcccaatcaatgtcgatgaactcgttggcatgtcaaaactgagtttaggtgaaactattggtgatgctggcccctcgactctgtctcgtaaactactcgaagaaggtccgtctagacagtctgcttttcatacaactccagcttgtgggactgttctgtga

SEQ ID NO: 125 - protein, 326 aa, Medicago truncatula
MTRRCSHCSHNGHNSRTCPNRGVKLFGVRLTDGIRKSASMGNLSHYSGSGSGLLNTGSNTPGSPGENPDHGADGYGSEDFVPGSSSTSRERKKGTPWTEEEHRMFLLGLNKLGKGDWRGIARNYVISRTPTQVASHAQKYFIRQSNVSRRKRRSSLFDIVADDAPDTSMVPQDFLSANQLQTETEGNNPLPAPPPLDEECESMDSTNSNDGESASAPLKPDSNAQASAYPVVYPAYYSPFFPFPLPYWSGYSPEPAPKKETHEVVKPTPVHSKSPINVDELVGMSKLSLGETIGDAGPSTLSRKLLEEGPSRQSAFHTTPACGTVL

SEQ ID NO: 126 - DNA, 1023 bp, Medicago truncatula
atgactcggcgttgctctcactgcagcaacaacggccataactcacggacatgtccgtcgagaacagccgccgccggcggggtcaagctttttggtgttagattaaccgatggatcaatcatcaagaaaagtgcgagtatgggaaacctaaacctcgccgctcttcatcattcttcttcttcttcatcgctgaaccccggttcatcgttgaatcccggctcaccttgttttgaaccgccgcatgacccggatggttatttgtctgatgacccggttcatgcttcttctgctttcgctacccgccgcagcgaaagaaaaaaaggtgttccatggactgaggaagaacatagattgttcttggttggtctccaaaagctaggcaaaggagactggcgagggatagcacgtaattttgttgtgtcaaggacccctactcaagtagcaagtcatgcacaaaagtactttatccgacagagtaatgctaccaggaggaagagacgttccagtcttttcgacatggctcctgatgtgtgtccagattcaacttcgatgccagaagagcaagtactacttccaccttctgagaactcacaaccttgtaatggaaaatcacaaccatcactaaatctgtctctcaagtcagaatatgaaccaatggaaactacatcagaagaaaatatagaagaggccaatgagactacaatgggatcaaatggattcacaccaatgactcaaggattcttcccaccttatttacctgcctcattttccatatggccatcaattggagctccctttgaagaagtcaacagaggagagacatcacatcatcaggtcctcaagccaataccagtcattccaaaggaacctgtcaatgttgatgagcttgtgggaatgtctcatctgagcattggggaaacacgggttcttgatagagagccttcccccctttccttagaagttgttaggagagccctcaaggcaatcagcattccatgcaaatgctccagttggtggttctga

SEQ ID NO: 127 - protein, 340 aa, Medicago truncatula
MTRRCSHCSNNGHNSRTCPSRTAAAGGVKLFGVRLTDGSIIKKSASMGNLNLAALHHSSSSSSLNPGSSLNPGSPCFEPPHDPDGYLSDDPVHASSAFATRRSERKKGVPWTEEEHRLFLVGLQKLGKGDWRGIARNFVVSRTPTQVASHAQKYFIRQSNATRRKRRSSLFDMAPDVCPDSTSMPEEQVLLPPSENSQPCNGKSQPSLNLSLKSEYEPMETTSEENIEEANETTMGSNGFTPMTQGFFPPYLPASFSIWPSIGAPFEEVNRGETSHHQVLKPIPVIPKEPVNVDELVGMSHLSIGETRVLDREPSPLSLEVVRRALKAISIPCKCSSWWF

SEQ ID NO: 128 - DNA, 1131 bp, Nicotiana benthamiana
atgactcggcggtgttcccattgcaacaacaatggccacaattcccggacttgtcccaccaccaggggtggcacccccaccggcggtgtaggtagttcctccggcggcggcggcggagcaagtggaggtgtacggctatttggtgtacggcttacagatgggtcgatcatgaagaaaagtgcaagcatgggaaatttatcttctctccactcttatcattcttcttcttcgcctaatccgccaggttccccttcttctgatggtcctcatttgcctgatggttacctctctgatgatcccaatacgcatgcctctatttctgctaatcgccgacttgaaaggaaaaaaggtgttccatggacagaggaagagcaccggcttttcctgcttggtttacagaaattaggcaaaggagattggcggggtatatctcgaaacttcgtgacatcaaggactcccacccaggtagctagccatgctcagaagtattttattcggcagagtaatgctactcggagaaagagaagatccagtctttttgacattgttgcagattcggggactgatgcttcccatccactaccagaagaacaatttatgctcccacctagagcaatagaaagtgataaggaacacttagcgccttctgcaacaaaagcaatagaaactgattttgcagattcactcccttccttagatctttctctcaagtcagattttgaatccatggaaacaactccaagtgaacctgttgaagaagcgaaaccaaataccacaaccaacgagatcccttcagtatttccagcattcctcccagcttacattccagttccatattccttctggccatcaaatgcagttcctgtgcctgaagatagaggagcagaaccatctcatcatcagatcctcaagccaattccaactgtccccaaagaacccgtgaatgtagatgaactagtgggaatgtcccagctcaccttagtggacgctggttctggccatattgagccttcaccactctccctcaagttaacagcagaaccgtcaaggcaatcagcatttcatgcgagcacgccagtcaaaagctcagagattaccaagggtgaaactgctccaattcaagcagtttaa

SEQ ID NO: 129 - protein, 376 aa, Nicotiana benthamianaW
MTRRCSHCNNNGHNSRTCPTTRGGTPTGGVGSSSGGGGGASGGVRLFGVRLTDGSIMKKSASMGNLSSLHSYHSSSSPNPPGSPSSDGPHLPDGYLSDDPNTHASISANRRLERKKGVPWTEEEHRLFLLGLQKLGKGDWRGISRNFVTSRTPTQVASHAQKYFIRQSNATRRKRRSSLFDIVADSGTDASHPLPEEQFMLPPRAIESDKEHLAPSATKAIETDFADSLPSLDLSLKSDFESMETTPSEPVEEAKPNTTTNEIPSVFPAFLPAYIPVPYSFWPSNAVPVPEDRGAEPSHHQILKPIPTVPKEPVNVDELVGMSQLTLVDAGSGHIEPSPLSLKLTAEPSRQSAFHASTPVKSSEITKGETAPIQAV

SEQ ID NO: 130 - DNA, 1101 bp, Oryza sativa
atgacgaggcggtgctcgcactgcagcaacaacggccacaacgcgcggacctgccccgcccgcggcggcggtggaggcggaggcggggtgaggctgttcggcgtgcggctcacgtcgccgccggaggtggcgatgaagaagagcgcgagcatgagctgcatcgcgtcgtcgctcgggagtggcggtgggtcagggggttcgtcgccggcgggaacgggaaggggaggaggaggagggggagagggcgcggccgggtacgcgtccgacgaccccacgcacgcctcctgctcgacgaatggccgcggcgagcggaagaaaggtacaccttggactgaagaagagcatagaatgtttctaatgggtctgcagaagcttggtaaaggagactggcgtgggatctctcgtaattttgttgtttccaggacaccaactcaggtggctagccatgctcaaaagtacttcattagacagacaaactcatcaagaaggaagaggaggtcaagcttgtttgacatggtcccagaaatgcccatggacgaatccccagtggtcgtagaacagcttatgctccatagtactcaagacgaagccacaagctcaaatcaattgccaatatcacatcttgtgaaacagaaggaacctgagtttgctagacacctgtcggatttgcagctaaggaagcatgaggaatctgagttcacagaaccttcactagcagcactagacttggagatgaaccatgctgcacctttcaagactaaatttgttctgacaatgccaacattctacccggcattaatacctgttccactaactctttggcctccaaatgttgctaatgtgggtgaatcaggcacaaatcatgaaatcctaaagcccactccagtgaatggaaaggaggtgatcaataaggctgatgaggttgttggcatgtccaagcttaccataggtgacggcagctctaactccatagaaccctctgctctttcccttcagcttactggaccgacaaatacaagacaatcagcttttcatgtgaacccaccaatggctggacctgacctaaataagagaaacaacagcccaattcatgcagtttga

SEQ ID NO: 131 - protein, 366 aa, Oryza sativa
MTRRCSHCSNNGHNARTCPARGGGGGGGGVRLFGVRLTSPPEVAMKKSASMSCIASSLGSGGGSGGSSPAGTGRGGGGGGEGAAGYASDDPTHASCSTNGRGERKKGTPWTEEEHRMFLMGLQKLGKGDWRGISRNFVVSRTPTQVASHAQKYFIRQTNSSRRKRRSSLFDMVPEMPMDESPVVVEQLMLHSTQDEATSSNQLPISHLVKQKEPEFARHLSDLQLRKHEESEFTEPSLAALDLEMNHAAPFKTKFVLTMPTFYPALIPVPLTLWPPNVANVGESGTNHEILKPTPVNGKEVINKADEVVGMSKLTIGDGSSNSIEPSALSLQLTGPTNTRQSAFHVNPPMAGPDLNKRNNSPIHAV

SEQ ID NO: 132 - DNA, 1152 bp, Oryza sativa
atgacgcgtgacggcgcgctgccggcgagcggcggcggcggggcggcggaggggccgaggcggtgctcgcagtgcgggcaccacgggcacaacgcgcggacgtgcacggcgaggggccccgtgaagctgttcggcgtgcggatcggcgacaagccgccgaccgcggccgcgggcggaggaggagggatgaggaagagcgccagtatggggagcctcgcgcagctggcggaggggggcggcggcggcggcgggagggaggaggggtacggctccgatgggaacgacgacaaacggcggaagcgaggtgaggcatggtcagaagaggagcacaaaaagtttctacttgggcttagtaagttaggaaaaggtgattggcgcggcatatcacgcaattatgttggttcaaggacgcctactcaagttgctagccatgctcaaaagtacttcattcgccaaacaaatgtgcacaggagaaaaagaagatcaagccttttcgatatggttatagatgattctgatgaccaaccactgtcccgtacatcttcacaagaagtagaagtagaagagaatctagaagatggacatcctgttactgcaccagtgatcccacctgctcctgtgcctatgctatcatcctctttggttccgccaccagtaccagcaatggcaccagttgctccaggtcctgtgttaacatctgcttcggccacactaccagtgtcagcagtggcaccccaaaccgatgaaaaggaacaagttgcctcaggttcaaatacaacagagacaggggctgcaattccagaagtcatgcccccatatggttatccaatgatgcttcctccatactacccaccggcatttgttccaatgccctactatggttatgtgcctgttttctatgcaccaccaggagcagtgcaagcacaacatgaggttgtcaagcctgtggccgtgcactcaaaacctccagtgcacatcgatgaactctacagcatgtccgaactcagcctgaagggcgaggctggtgtgaaaaacggcactcctaattctctgttgcctccaagaccaattggtagaccagacaggcaatctgcttttcatggaaaaggaccttctgatggctcttcaaatggactgattcctgcaaagtga

SEQ ID NO: 133 - protein, 383 aa, Oryza sativa
MTRDGALPASGGGGAAEGPRRCSQCGHHGHNARTCTARGPVKLFGVRIGDKPPTAAAGGGGGMRKSASMGSLAQLAEGGGGGGGREEGYGSDGNDDKRRKRGEAWSEEEHKKFLLGLSKLGKGDWRGISRNYVGSRTPTQVASHAQKYFIRQTNVHRRKRRSSLFDMVIDDSDDQPLSRTSSQEVEVEENLEDGHPVTAPVIPPAPVPMLSSSLVPPPVPAMAPVAPGPVLTSASATLPVSAVAPQTDEKEQVASGSNTTETGAAIPEVMPPYGYPMMLPPYYPPAFVPMPYYGYVPVFYAPPGAVQAQHEVVKPVAVHSKPPVHIDELYSMSELSLKGEAGVKNGTPNSLLPPRPIGRPDRQSAFHGKGPSDGSSNGLIPAK

SEQ ID NO: 134 - DNA, 957 bp, Oryza sativa
atgacgaggcggtgctcgcactgcagccacaacgggcacaactcgcggacgtgccccaaccgcggggtcaagatcttcggggtgcgcctcaccgatggctccatccgcaagagcgccagcatggggaacctctccctcctctcctccgccgccggatccaccagcggcggcgcctcccccgccgacggccccgacgccgcccccaccgccgccgacggctacgcctccgacgacttcgtccagggctcctcctccgccacccgcgaccgcaagaagggtgttccttggactgaagaagaacaccggaggtttttgcttggattgcaaaagcttggcaaaggtgattggcgaggaatctctcgtaatttcgtggtctcaagaacacctactcaagtagccagtcatgctcagaaatattttatacgccaatccaatatgaccagaaggaaaagaaggtctagcctttttgacatggtgccagatgagtctatggaccttccaccacttcctggaggtcaagaaccagagacccaagtattaaatcaaccagcactacctccaccgagggaggaggaggaggtagattctatggagtcagatacttctgccgttgcagagagctcttccgcttctgctatcatgccagataatttgcagtcgacctatccagtgattgttccagcttatttctcgccctttttgcaattctcggttcctttctggcaaaatcagaaagatgaagatggtcctgtgcaagaaacacatgagattgtcaagcctgttccagttcattcaaagagcccaatcaacgttgatgagcttgttggcatgtcgaagctcagcataggagagtccaatcaagagacagtgtctacttctctttcattaaatctggtaggaggtcaaaatagacaatcagctttccatgcaaatccaccaacaagggcacaggcatga

SEQ ID NO: 135 - protein, 318 aa, Oryza sativa
MTRRCSHCSHNGHNSRTCPNRGVKIFGVRLTDGSIRKSASMGNLSLLSSAAGSTSGGASPADGPDAAPTAADGYASDDFVQGSSSATRDRKKGVPWTEEEHRRFLLGLQKLGKGDWRGISRNFVVSRTPTQVASHAQKYFIRQSNMTRRKRRSSLFDMVPDESMDLPPLPGGQEPETQVLNQPALPPPREEEEVDSMESDTSAVAESSSASAIMPDNLQSTYPVIVPAYFSPFLQFSVPFWQNQKDEDGPVQETHEIVKPVPVHSKSPINVDELVGMSKLSIGESNQETVSTSLSLNLVGGQNRQSAFHANPPTRAQA

SEQ ID NO: 136 - DNA, 564 bp, Physcomitrella patens
atgagcaggcggtgctcgcactgcggcctcaatggccacaacagccggacgtgtcccgaacgaggggtgcggctgttcggggtgcggctgacggacagcgtgagcagcacgaacatgcggaagagtgtgagcatgaacaatttgagccactactcgaacgtgcacaacccggcgtcgcctccagagcagtgggagtccggagcggctcccgacgggtatgtgtcggatggtctggtgcagacgtcgaacaacgctcgagagcgcaagaaaggtgtgccgtggacagaagatgagcaccgtctattcttgctgggattgcaaaagctcggaaaaggtgattggagaggtatttcgaggaattatgtgcatacccggacaccgacgcaggttgcaagtcatgctcagaagtatttcatcagacagagtaacttgaacaagagaaagagacgatccagcctttttgacatagtttctgaatcggcaagtgtctaccatatctctgcagcatttccacgtgtcagtaatgtttgcaatactgatagcaaccgaacagcaactaactga

SEQ ID NO: 137 - protein, 187 aa, Physcomitrella patens
MSRRCSHCGLNGHNSRTCPERGVRLFGVRLTDSVSSTNMRKSVSMNNLSHYSNVHNPASPPEQWESGAAPDGYVSDGLVQTSNNARERKKGVPWTEDEHRLFLLGLQKLGKGDWRGISRNYVHTRTPTQVASHAQKYFIRQSNLNKRKRRSSLFDIVSESASVYHISAAFPRVSNVCNTDSNRTATN

SEQ ID NO: 138 - DNA, 957 bp, Physcomitrella patens
atggctcgcgggtgctcccactgtggtcataacggtcataattcaaggacatgccctgatcgaggggtgagactgtttggtgttaggctcacagatggggttatgaggaagagtgtcagtatgggtaacctaagccactacatcggccccaacaaccctccttctccacccagtcattccgagtctggagccggtggcgatggctacgtctccgacggtctcgttcagacatcgaacaacaccagagaaaggaagaaaggtgtaccatggacagaggaggaacatagactttttttacttggccttcagaagcttggaaaaggagattggaggggtatatccaggaactttgtccaaaccaggacaccaactcaagtggctagtcatgctcagaagtattttatcagacaaagcaatatgaacaagcgaaagaggcgatcgagtctctttgatatcgtctccgaaacgcttagcttaggaccaaactcgatgtacccagggatattctacgatgctaacaatccacatggttatgttaggccctatatgctacccccaacctcaatggctgtacccatcatgtcgattggacctgtctcgttaggggcttcggagcaaataccagagacatctgcggtgaatttctcaggacctaatggtgcaatgggcatttcttatcctttcccaatgttttcaatgatgccacgaggatacaacaggcctgtaaactctgtggactcgaaggtattgaggcccacagcgaagttatcaacagaacctttgaatgttggcgtcaatgagacgaaggagatgtcgcagttgaatttgggactacctaccccagaaccgtctcaactcactctgaagcttttggatcaaccatccaggagttcttctgctttccatgttagcacaagtagcatcagttcaagcggcaatgcgatcggtgtggtgtga

SEQ ID NO: 139 - protein, 318 aa, Physcomitrella patens
MARGCSHCGHNGHNSRTCPDRGVRLFGVRLTDGVMRKSVSMGNLSHYIGPNNPPSPPSHSESGAGGDGYVSDGLVQTSNNTRERKKGVPWTEEEHRLFLLGLQKLGKGDWRGISRNFVQTRTPTQVASHAQKYFIRQSNMNKRKRRSSLFDIVSETLSLGPNSMYPGIFYDANNPHGYVRPYMLPPTSMAVPIMSIGPVSLGASEQIPETSAVNFSGPNGAMGISYPFPMFSMMPRGYNRPVNSVDSKVLRPTAKLSTEPLNVGVNETKEMSQLNLGLPTPEPSQLTLKLLDQPSRSSSAFHVSTSSISSSGNAIGVV

SEQ ID NO: 140 - DNA, 2085 bp, Physcomitrella patens
atggacttgggtgatgggcatccacgccacggtcatggaaagttttcgtttggaacccatgaccggtctccactggtactgcgcaggtcacttccagcagactcaccgcgaggacccaaacccgtgaaggcacacgcggccttaagaatcaccgatgcttcgtcctgtccaaccacatgcatgccgtcatatccaaaaacaaacgatgagacaaaatatatgaatgaaacatgccaatatggatgcacagagaagctcgcgggggtgctgaaccacgctgtggaaagggctactgcgcattgggtcggggctagttcgcagagaaatcggccgagaggaggtttgaaatcccgatttcgaagccacgccccgagtggtggtggcaggatgctggtggaggcagggaaggactcatgttccaaggcggtcaagctggcagccctggaacatatcgagatgagcaggcgctgctcgcactgcggcctgaatggccataacagccggacatgtcccgaccgcggggtgaggctgtttggcgtgcggctgacggacggtattagcagcatgaacatgcggaagagcgtgagtatgaataatctgagccactacacgagcacgcacaactccccgtcaccatctgagcactcagagtctggagcggctcccgacgggtatgtgtcggatggcctggtgcagacgtcgaacaatgctcgagagcgcaagaaaggagtaccgtggacagaagacgagcatcgcttgttcttgctgggattgcaaaagctcggaaaaggtgactggagaggtatctcgaggaatttcgtgacaaccaggacgcccacacaggttgctagtcacgcccagaagtacttcatccgacaaagcaacatgaacaagcggaagaggcgatcgagcctcttcgacatcgtatcgacgtcggggggcggtgtcgtggtgatgataggatggtcgcagtccgtggggatgcgagtagaagtcgggtgggatatgattagggacgttggtagagaatggaatgggatggttgtgggaggtgggacatgtgatctgagatggggagggttgtggtcgatggcagggcgttccttcgattgcggaagagtcgacatgcatgggagacgaggagcagacgaacccactgcaccagttgagcttggggcagaaccgcatgtacccgtcgggggtgttgtacgagccaagttcggtggcgggatacggagtatcggtgggaggattcgcggtgccgaagcacatgagtcctccggcgatgggaatgggcgcggatggggtgacggaggtggtggggatggggtacaaggtggagcatttggcgaggagtggaatggagggggcggggatgagctacggcatggagaggagtggaatggagagagggggtgcgggcgtggcggtagcagcaggggcgggtctgtcgctgggagggtcagcgggagcaggaaggatcccgtactcgttcacgtcgtcgggtggaggaggggtgggttcggtgtcgacggcgcaggcgccgggtcaggggcaggcacagcagggatcgagcagcagaggaggggggtcatacggagcgaacccggcgatcgtgagaccgacggcgaaggtgggcggtgcgagcagcgcagcgacgaagatggaggaggatggtcgggacatagcgcagctgaggctggggctgtcaccgccggagccatctcagttgacggcaaagctgttggaggcgccgtcgaggcattcatcagcgttccacgtgaacacgtcgttcgatgggagcagcatacaacaaggagtgaacgcgatcagcgtggtgtgaagcggcagagatggataagttatattttagttagcgtgcaaaattcttacccaatttatagatgctttgaagtcttacatgttggtcttcacaattgtcttttgtgcagtcactcagtgctgcagaaccgatatctgtcgcattctagaattgggtattatgggttggctgcaatcggaagcaatgaggcagagcattgcggccatggggatgagagcgatctaagcacaagactcaggtag

SEQ ID NO: 141 - protein, 694 aa, Physcomitrella patens
MDLGDGHPRHGHGKFSFGTHDRSPLVLRRSLPADSPRGPKPVKAHAALRITDASSCPTTCMPSYPKTNDETKYMNETCQYGCTEKLAGVLNHAVERATAHWVGASSQRNRPRGGLKSRFRSHAPSGGGRMLVEAGKDSCSKAVKLAALEHIEMSRRCSHCGLNGHNSRTCPDRGVRLFGVRLTDGISSMNMRKSVSMNNLSHYTSTHNSPSPSEHSESGAAPDGYVSDGLVQTSNNARERKKGVPWTEDEHRLFLLGLQKLGKGDWRGISRNFVTTRTPTQVASHAQKYFIRQSNMNKRKRRSSLFDIVSTSGGGVVVMIGWSQSVGMRVEVGWDMIRDVGREWNGMVVGGGTCDLRWGGLWSMAGRSFDCGRVDMHGRRGADEPTAPVELGAEPHVPVGGVVRAKFGGGIRSIGGRIRGAEAHESSGDGNGRGWGDGGGGDGVQGGAFGEEWNGGGGDELRHGEEWNGERGCGRGGSSRGGSVAGRVSGSRKDPVLVHVVGWRRGGFGVDGAGAGSGAGTAGIEQQRRGVIRSEPGDRETDGEGGRCEQRSDEDGGGWSGHSAAEAGAVTAGAISVDGKAVGGAVEAFISVPREHVVRWEQHTTRSERDQRGVKRQRWISYILVSVQNSYPIYRCFEVLHVGLHNCLLCSHSVLQNRYLSHSRIGYYGLAAIGSNEAEHCGHGDESDLSTRLR

SEQ ID NO: 142 - DNA, 1974 bp, Physcomitrella patens
atgagcagcgatcggtggttccacgcaacaggaggcaacataagtgtgagtcgtcgcatcaagcattttccaccccccccccccactctccgcctcgttgtccgatttgctcgctgtagacgggttacaagctcccgttcaaaggcgcaggaaaaggattgggtggtgatgcgcattgggtcgaggcgaattctgggaaaaagcgtcggatttaggtttcaaagggtcgatttctggagctccacccggtggtttgagcgcgccggtggagtcgaaggggggatcggcaccaactccgtggaggctcagggcgggactgagcattgcggtgacaagggagagttcgatcaagttgtgggttttgcttctgtgctggaaattgaggccctggaggagcacgagatgagcaggcggtgctcgcactgcaacttgaatggccacaatagccggacgtgctccgaccggggggtgcgtctatttggagtgcggctgacagacagcgtcagcagcatgaacatgcggaaaagtgtgagtatgaataatctgagtcactacacgagcgcgcacaaccctccttcgcctcctgagcactcagagtccggagcggctcctgatggatatgtatcagatggtctcgtgcaaacgtcaaacaatgcccgagagcgcaaaaaagcctttctatgtgcatcatttcgaaaaataattcatttaggtcaaaaatgttcacaagtgaaaaggcgggttcagactcacgggaacatccctaatcattctgtcggagtgccgtggacagaagacgagcatcgcttgttcttgctgggattgcaaaagctcggaaaaggtgactggagaggtatctcgaggaatttcgtgacaaccaggacgcccacacaggttgctagtcacgcccagaagtacttcatccgacaaagcaacatgaacaagcggaagaggcgatcgagcctcttcgacatcgtatcgacgtcggggggcggtgtcgtggtgatgataggatggtcgcagtccgtggggatgcgagtagaagtcgggtgggatatgattagggacgttggtagagaatggaatgggatggttgtgggaggtgggacatgtgatctgagatggggagggttgtggtcgatggcagggcgttccttcgattgcggaagagtcgacatgcatgggagacgaggagcagacgaacccactgcaccagttgagcttggggcagaaccgcatgtacccgtcgggggtgttgtacgagccaagttcggtggcgggatacggagtatcggtgggaggattcgcggtgccgaagcacatgagtcctccgatggcgttaccgttgatgtcggtgggaaacgcgatgggaatgggcgcggatggggtgacggaggtggtggggatggggtacaaggtggagcatttggcgaggagtggaatggagggggcggggatgagctacggcatggagaggagtggaatggagagagggggtgcgggcgtggcggtagcagcaggggcgggtctgtcgctgggagggtcagcgggagcaggaaggatcccgtactcgttcacgtcgtcgggtggaggaggggtgggttcggtgtcgacggcgcaggcgccgggtcaggggcaggcacagcagggatcgagcagcagaggaggggggtcatacggagcgaacccggcgatcgtgagaccgacggcgaaggtgggcggtgcgagcagcgcagcgacgaagatggaggaggatggtcgggacatagcgcagctgaggctggggctgtcaccgccggagccatctcagttgacggcaaagctgttggaggcgccgtcgaggcattcatcagcgttccacgtgaacacgtcgttcgatgggagcagcatacaacaaggagtgaacgcgatcagcgtggtgtgaagcggcagagatgtgacgatggtgcgaaatgcgttgcactttcaaagtaa

SEQ ID NO: 143 - protein, 657 aa, Physcomitrella patens
MSSDRWFHATGGNISVSRRIKHFPPPPPTLRLVVRFARCRRVTSSRSKAQEKDWVVMRIGSRRILGKSVGFRFQRVDFWSSTRWFERAGGVEGGIGTNSVEAQGGTEHCGDKGEFDQVVGFASVLEIEALEEHEMSRRCSHCNLNGHNSRTCSDRGVRLFGVRLTDSVSSMNMRKSVSMNNLSHYTSAHNPPSPPEHSESGAAPDGYVSDGLVQTSNNARERKKAFLCASFRKIIHLGQKCSQVKRRVQTHGNIPNHSVGVPWTEDEHRLFLLGLQKLGKGDWRGISRNFVTTRTPTQVASHAQKYFIRQSNMNKRKRRSSLFDIVSTSGGGVVVMIGWSQSVGMRVEVGWDMIRDVGREWNGMVVGGGTCDLRWGGLWSMAGRSFDCGRVDMHGRRGADEPTAPVELGAEPHVPVGGVVRAKFGGGIRSIGGRIRGAEAHESSDGVTVDVGGKRDGNGRGWGDGGGGDGVQGGAFGEEWNGGGGDELRHGEEWNGERGCGRGGSSRGGSVAGRVSGSRKDPVLVHVVGWRRGGFGVDGAGAGSGAGTAGIEQQRRGVIRSEPGDRETDGEGGRCEQRSDEDGGGWSGHSAAEAGAVTAGAISVDGKAVGGAVEAFISVPREHVVRWEQHTTRSERDQRGVKRQRCDDGAKCVALSK

SEQ ID NO: 144 - DNA, 972 bp, Prunus persica
atgactcggaggtgctcgcattgcagccacaatggccacaactctcggacgtgccccaaccgaggggtcaagctcttcggcgttcgcttgaccgatggctccatcaggaagagcgctagtatgggcaatctctcccactatgccgggtcgagttcgggtccccacccgaacaatccgggttctcccggcgacaccaccaacgatcacgccggcgctgccgacgggtatgcctctgaggacttcgtgcccggatcgtcttcgagccgtgaacggaaaaaaggcactccatggactgaagatgaacataggatgtttttactcggactgcagaagcttggcaaaggtgactggcgtgggattgctcgcaattacgtcatatcaagaacacctactcaagtagctagccatgctcagaaatatttcattaggcagactaatgtgtcgaggagaaaacggcgttccagcctgtttgatattgtagcagatgattcagttgaggctccaatggaaccactagacttcttacctggcaaccatctacaagctgaaagtcaaagcaacaacccattgcccgctcctccagctttggatgaagaatgtgaatcaatggattctaccaactcagatggagaacctctccctccacagcctgatagctcacagtcattttacccaatgatatatcctgcatatttctcacctttcccagttccttttccattgtggcctggatacagtactgagcccactaagcaggataaacacgaggttctcaagccaacagcagtacattcaaagagcccgattaatgttgatgagctagtaggaatgtcaaaactgagcttaggagagcctataggtcattccggcccctcctcgcttacgctaaagctggttgaagggtcttctaggcagtcggcttttcatgcaaatccaggctctgggaagttctggcatgaattcaagtggtag

SEQ ID NO: 145 - protein, 323 aa, Prunus persica
MTRRCSHCSHNGHNSRTCPNRGVKLFGVRLTDGSIRKSASMGNLSHYAGSSSGPHPNNPGSPGDTTNDHAGAADGYASEDFVPGSSSSRERKKGTPWTEDEHRMFLLGLQKLGKGDWRGIARNYVISRTPTQVASHAQKYFIRQTNVSRRKRRSSLFDIVADDSVEAPMEPLDFLPGNHLQAESQSNNPLPAPPALDEECESMDSTNSDGEPLPPQPDSSQSFYPMIYPAYFSPFPVPFPLWPGYSTEPTKQDKHEVLKPTAVHSKSPINVDELVGMSKLSLGEPIGHSGPSSLTLKLVEGSSRQSAFHANPGSGKFWHEFKW

SEQ ID NO: 146 - DNA, 684 bp, Picea sitchensis
atgacgcgcaagtgctcgcactgcggcaataatgggcacaactccaggacgtgccctaaccgcggcggggtgaagctcttcggcgttcggctcaccgatggcccgatcagaaagagcgcaagcatggggaatttgatgatgatggccagccctagctctcccgctgacccctccgagccggcctctgccgctgccgctgctgcagccgcggccgccgacggctatctctccgatggcctcgtggaggcctccacctcctccaattctcgcgagaggaagaaaggtgtgccatggacagaggaagaacatagaatgtttttgctaggtttgcagaagcttggcaaaggtgattggagaggaatagcacggaattttgtcataacacgaacacctacacaggtagccagccatgcacagaaatattttattcgacagagcaatatgactagaaggaagagacgttccagtctgtttgacatgacaccggatcccagtgcaacagcagtatcagtagaagattattcaaaagtttcttccattgatcctatttgtgatagctctgttcaaaatcagatactacctactggccatactgtctgtgatagttcttctcaaaatcagatactacctactggccacaccgttttgcgatggctctgctcaaaatcagattttacctactag

SEQ ID NO: 147 - protein, 227 aa, Picea sitchensis
MTRKCSHCGNNGHNSRTCPNRGGVKLFGVRLTDGPIRKSASMGNLMMMASPSSPADPSEPASAAAAAAAAAADGYLSDGLVEASTSSNSRERKKGVPWTEEEHRMFLLGLQKLGKGDWRGIARNFVITRTPTQVASHAQKYFIRQSNMTRRKRRSSLFDMTPDPSATAVSVEDYSKVSSIDPICDSSVQNQILPTGHTVCDSSSQNQILPTGHTVLRWLCSKSDFTY

SEQ ID NO: 148 - DNA, 1011 bp, Pinus taeda
atgaacaggaggtgctctcattgtggacacaatggccacaactccagaacttgtcccgacaggggagtgaagctattcggcgttaggcttaccaccgatgaaccgatgaggaagagcctcagcatgggaaatctcccgttaactcccgaacaatctgaatctggagctgctgaagacggatatgtttcggacggcttggttcaaaactctcgtgaaagaaaaaaaggcgttccttggacggaagaagaacataaaatgtttttattagggcttcacaaattgggaaaaggcgactggagaggtatttccagaaactttgtcacttccagaactcctactcaagttgctagccacgcacaaaaatattttcttaggcagagtaatttgaacaaaaggaaacgaaggtcgagcctgttcgatatatccactgattcgatggaagattgctatcaaggaatcccggagctgtcaccggtgatgcacgatctcagcctgggccagaattcatctctgacctctggaaatttcttcgaaactggaggagcacctccaaatttagccgcctctgtgggagcattttctgtacctccgttggcagcatcgcggccagttattcccccttgcctatctttgggaatgtacagattagacaaatccgacgatggcgaaagggccagatatgaagctaaatattcctctctgaatgaggcggaacgtcaagaatctggtgggtactctaaccctaccagtcactattcattcactctgccattttggccagacttagccacaaaggcttccaaaataattaagccaagtgcgccaacttcgccttcaatggaggcaagagaatcgatcgaaaatagcgggttgagtctgagcatagcccctccttccgtggatcctccagcgcctcacaacactgtcaaccttgaccaatccaattctcgccgctccgcgtttcgttccagcaaccttgattccagcagcaatgccattagcgtagtctga

SEQ ID NO: 149 - protein, 336 aa, Pinus taeda
MNRRCSHCGHNGHNSRTCPDRGVKLFGVRLTTDEPMRKSLSMGNLPLTPEQSESGAAEDGYVSDGLVQNSRERKKGVPWTEEEHKMFLLGLHKLGKGDWRGISRNFVTSRTPTQVASHAQKYFLRQSNLNKRKRRSSLFDISTDSMEDCYQGIPELSPVMHDLSLGQNSSLTSGNFFETGGAPPNLAASVGAFSVPPLAASRPVIPPCLSLGMYRLDKSDDGERARYEAKYSSLNEAERQESGGYSNPTSHYSFTLPFWPDLATKASKIIKPSAPTSPSMEARESIENSGLSLSIAPPSVDPPAPHNTVNLDQSNSRRSAFRSSNLDSSSNAISVV

SEQ ID NO: 150 - DNA, 1173 bp, Pinus taeda
atgacgcgcaagtgctcgcactgtggcaacaacgggcataactccaggacgtgccctaaccgcggcggggtgaagctcttcggcgttcggcttaccgatggcccgatcagaaagagcgctagtatggggaatttgatgatgatgtccaaccctagctctcccgctgacccctccgagccggcctctgccgctgctgctgccgcggcggcggcggccagtggctatctctctgatggtcttgtggaggcctccacttcctccaattctcgcgagcggaagaaaggtgtgccatggacagaggaggaacatagaatgtttttgctaggtttgcagaagcttggcaaaggtgattggagaggaatagcacggaattttgtcataacacgaacacctacacaggtagccagccatgcacagaaatattttattcgacagagcaatatgactagaaagaagagacgttccagtctgtttgacatgacaccggaccccagttcaacagcagtatcggtagaagattatccaaaagttgcttccattgatcctatttgtgatagctctgttcaaaatcagatactaccgaccggccattctgtttgtgataattcttctcaaaaccagatgctacctactggccacaccagttgtgacagctctgttcaaaatcagatgttacctactgacctaaattctgtgtttaatcaaggtcctcttgttgagcctaataatggtgccccgttatcatcacagccagcttcggatcaggaatttgaatcaaattattcggaaaagactgcagaagcggaaaactctttttcacagtgtgcggcagcaatggcttgtggtgttccaatgacatttccaggtttcatggcaccattacttccttttccattcccagtttggcctggttttaggcctgctacaacagaattgccaccaaattccaacatttttaagccaagggctgagattccaaaagctcctgtgaatattatcgatgaaacaggcatctcaaagttgagtatcggtgatccacctggttctattgaaccttcaggattgtcactgaagcttctaaataaaccttcaaggcagtcggcttttcatacaaatccagctctgaatgataatggcttcagttctagtggcaatgcgattcatgtagtttaa

SEQ ID NO: 151 - protein, 390 aa, Pinus taeda
MTRKCSHCGNNGHNSRTCPNRGGVKLFGVRLTDGPIRKSASMGNLMMMSNPSSPADPSEPASAAAAAAAAAASGYLSDGLVEASTSSNSRERKKGVPWTEEEHRMFLLGLQKLGKGDWRGIARNFVITRTPTQVASHAQKYFIRQSNMTRKKRRSSLFDMTPDPSSTAVSVEDYPKVASIDPICDSSVQNQILPTGHSVCDNSSQNQMLPTGHTSCDSSVQNQMLPTDLNSVFNQGPLVEPNNGAPLSSQPASDQEFESNYSEKTAEAENSFSQCAAAMACGVPMTFPGFMAPLLPFPFPVWPGFRPATTELPPNSNIFKPRAEIPKAPVNIIDETGISKLSIGDPPGSIEPSGLSLKLLNKPSRQSAFHTNPALNDNGFSSSGNAIHVV

SEQ ID NO: 152 - DNA, 1128 bp, Populus trichocarpa
atgactcggcggtgttcgcattgcagcaacaacggccacaactctcgaacctgtcccacgcgctcctctcttgcgtcttcgtcttcttctccgttatctggagtcaagctctttggcgtcaggctcaccgatgggtcaattattaaaaagagtgccagcatgggaaacttgtcggcgcactaccattcctcttcatcagccgccgcgtcacctaatcctgactctcctgtatctgatcgcgtccatgatgacggctatttgtccgatgaccccgctgcccatgctagctgctctaccagtcgacgcggagacaggaaaaaaggtgtcccgtggactgaagaggagcatcggctgttcttaataggtctacagaaattgggaaaaggagattggcgtggaatagctcgaaactttgtggtatctaggactcccactcaggtagcaagccatgctcagaaatttttcatccgccagagcaatgccactcggagaaagagacggtccagcctttttgatatggttccagaaatggcaacagatccacagccagttccagaagaacaagagttgccatcttctcaggcaggagatgatgataatgtagatgcactaccctcattgaatctctctctcaagccagaatttgaacccatggatactgaatctcaagaactagtcaaggaacgtgataaaactgtgatggggtttagtgaattcaaaccatctgttcctagttcaagtgaatttgtcccaatagtttcagggtcgaatgaattcacagcagttcctggatttttcccagcttacatgccagttccttatccgtattgggctccaaataccacaccctttgaagaaggtaagggtgcagcaacatcacatcacgaggtcctaaagccagttccaagcattctcaaggagcctttcaatgtagatgaactggttggcatgtctcatctcagtctaggagagattgagagacgccacagggagccttcaccgctctccctgaaactaattggggaggcaccaaggcagtccgcatttcatgcaagtgctccagccagtggatcagatttaagtaatggcaaggctagtcccatccaagcagtggcaccaaaaggttga

SEQ ID NO: 153 - protein, 375 aa, Populus trichocarpa
MTRRCSHCSNNGHNSRTCPTRSSLASSSSSPLSGVKLFGVRLTDGSIIKKSASMGNLSAHYHSSSSAAASPNPDSPVSDRVHDDGYLSDDPAAHASCSTSRRGDRKKGVPWTEEEHRLFLIGLQKLGKGDWRGIARNFVVSRTPTQVASHAQKFFIRQSNATRRKRRSSLFDMVPEMATDPQPVPEEQELPSSQAGDDDNVDALPSLNLSLKPEFEPMDTESQELVKERDKTVMGFSEFKPSVPSSSEFVPIVSGSNEFTAVPGFFPAYMPVPYPYWAPNTTPFEEGKGAATSHHEVLKPVPSILKEPFNVDELVGMSHLSLGEIERRHREPSPLSLKLIGEAPRQSAFHASAPASGSDLSNGKASPIQAVAPKG

SEQ ID NO: 154 - DNA, 855 bp, Populus trichocarpa
atgacaaggcatagatttttcaactgtaattttagagaattacctgctgtctggaatggtgtcccatggactgaagacgagcatcggctgttcttaattggtctccaaaaattgggtaaaggagattggcgtggaattgctcgaaactttgtggtatccaggactcccacccaggtggcaagccacgctcagaaatttttcatccgacagagcaatgccactcggagaaagagacggtccagtctttttgatatggttccagaaatggccacagatccgcagccagtgccagaagagcaagagttgcaatcttcttctcgggcaggagatactggtaatgcagattcactaccttcattgaatctctctctcaagccagaatttgaacccatggatattgcatctcaagagctagtcaaggaacctgataaaaccgtgatggggctgagtgaaatcaaaccaattgttcctagttcaaatgaatccagcacagttgtttcaggttcgagtgaattcacagcagttcctggattcttcccagcttacatgccagttccctatccgtattggcctccaaataccacctcctttgaagaaggtacggttgcagcggcttcgcatcatgaggtcctgaagccagttccaatcattccaaaggagccttttgttgtagatgaactggtcggtatgtctcatctgcatctaggagagactgatagacaccacagggagccttcaccactctccctgaaactaatcggggagccatcaaggcagtcagcgtttcatgcaagtgctccagctggtggatcagatttaagtaatggcaaggctagttccatccaagcagtttga

SEQ ID NO: 155 - protein, 284 aa, Populus trichocarpa
MTRHRFFNCNFRELPAVWNGVPWTEDEHRLFLIGLQKLGKGDWRGIARNFVVSRTPTQVASHAQKFFIRQSNATRRKRRSSLFDMVPEMATDPQPVPEEQELQSSSRAGDTGNADSLPSLNLSLKPEFEPMDIASQELVKEPDKTVMGLSEIKPIVPSSNESSTVVSGSSEFTAVPGFFPAYMPVPYPYWPPNTTSFEEGTVAAASHHEVLKPVPIIPKEPFVVDELVGMSHLHLGETDRHHREPSPLSLKLIGEPSRQSAFHASAPAGGSDLSNGKASSIQAV

SEQ ID NO: 156 - DNA, 1011 bp, Populus trichocarpa
atgacgaggcggtgctcgcattgcagtcacaacgggcacaactcccggacttgccccaaccgaggggtcaagttgtttggggttcgattgactgacgggtcgatccggaaaagtgctagtatgggtaatttaagtcactatactgggtcttctaatgtgggtgggcccctcacttccggtcctaacaatcccggatcaccaggtgatacccctgatcacggtattgccgccgccgccgccggttatgcttctgaggatttcgttcctgggtcctcttcgagtcgtgagagaaagaaaggtgttccatggactgaagaggaacataggatgtttctactaggtctgcagaagcttggtaaaggtgactggcgtggaattgctcgtaattatgttatatcaaggacaccaactcaggtggccagtcatgctcagaaatatttcatcaggcaaagcaatgtgtctaggaggaaaagacgttccagcctgtttgatatagttgctgatgaaccaggagacactccgatggaatcacaggacttcttgtctacaatcgaacaagagtctgaagcacaaagtgaaaatccagtgcctgtccctcctttggatgaagaatgtgaatctatggattctaccaactccaacgatggggaacccccacctcctaagccagattgctcacagtctgcttatccagtagtatacccatcttatttctcgcctttcttcccatattcttttccattttggtctggacacagtgcggagcccacaaagacagagacacatgaggttcttaagccaacagcagtgcattcaaaaagtccaatcaatgttgacgagctggttggcatgtcaaaactgagtttgggagaatctattggccaggatggcccctcttctctttcccagaaattgcttgaagggtcaccaagacaatctgctttccatgctaatccagcctctaccagttcgagcatgaacagaagcagcagcccaatccatgcagtttaa

SEQ ID NO: 157 - protein, 336 aa, Populus trichocarpa
MTRRCSHCSHNGHNSRTCPNRGVKLFGVRLTDGSIRKSASMGNLSHYTGSSNVGGPLTSGPNNPGSPGDTPDHGIAAAAAGYASEDFVPGSSSSRERKKGVPWTEEEHRMFLLGLQKLGKGDWRGIARNYVISRTPTQVASHAQKYFIRQSNVSRRKRRSSLFDIVADEPGDTPMESQDFLSTIEQESEAQSENPVPVPPLDEECESMDSTNSNDGEPPPPKPDCSQSAYPVVYPSYFSPFFPYSFPFWSGHSAEPTKTETHEVLKPTAVHSKSPINVDELVGMSKLSLGESIGQDGPSSLSQKLLEGSPRQSAFHANPASTSSSMNRSSSPIHAV

SEQ ID NO: 158 - DNA, 1002 bp, Phaseolus vulgaris
atgacccgacggtgctcccattgcagccacaatgggcacaattccaggacctgccccaatcgtggagttaagctcttcggagtccgattaaccgacgggtcgatccggaagagtgctagtatgggtaatctcacccattatgctggttccgggtccggacctctccatgctgggtcaaacaacccgggttctcctggtgaaacccccgatcacgttaccgcggccgatggttacgcctccgaggacttcgttcccggctcttcttctagctcccgtgaaagaaagaagggtgttccctggactgaggaggaacatagaatgtttttacttggattgcagaagctgggcaaaggtgattggcgtggaattgcaaggaactatgttatatcaaggacacctactcaagtggccagtcatgcacaaaaatatttcatcaggcaaagcaacgtgtccaggcggaaaagacggtccagcttgtttgatattgttgcagatgaaggagctgacactccaatggtacagcaagacttcttgtcagctaatcagttaccggttgaaacagaaggcaataaccccttgcctgcgcctcctcccctcgacgaagagtgtgaatccatggattccacaaactcaaatgatggagatcctgccccatcaaagcctgaaaacacacaatcatcttatccagtcttatatcctgcatactattctccagtgttcccgtttcctctgccctattggtccggatacagtccagagcccatcaagaaggagacgcatgaagtgctgaagccaactgcagtacattctaaaagccctatcaatgttgatgaactggttggcatctcaaaactgagtttaggggagtctattggtgatgcaggcccctcctccctgtctcttaaacttcttgaagaaggaccctcgagacagtcagctttccatgcaacaccgacatgtggcagttcaaatatgaatggcagtgccatccatgcagtttaa

SEQ ID NO: 159 - protein, 333 aa, Phaseolus vulgaris
MTRRCSHCSHNGHNSRTCPNRGVKLFGVRLTDGSIRKSASMGNLTHYAGSGSGPLHAGSNNPGSPGETPDHVTAADGYASEDFVPGSSSSSRERKKGVPWTEEEHRMFLLGLQKLGKGDWRGIARNYVISRTPTQVASHAQKYFIRQSNVSRRKRRSSLFDIVADEGADTPMVQQDFLSANQLPVETEGNNPLPAPPPLDEECESMDSTNSNDGDPAPSKPENTQSSYPVLYPAYYSPVFPFPLPYWSGYSPEPIKKETHEVLKPTAVHSKSPINVDELVGISKLSLGESIGDAGPSSLSLKLLEEGPSRQSAFHATPTCGSSNMNGSAIHAV

SEQ ID NO: 160 - DNA, 1146 bp, Ricinus communis
atgactcgacggtgttcgcattgcagcaacaacgggcataactcacgcacgtgtcccacgcgctcttcaacctgctcctcggctgcaggctctggctcgtcctcgtcttctgcatcgtcaatcgcaggtgtgagactattcggagtgaggcttacggatggatcaattattaaaaagagtgcgagtatgggtaatttgtctgctcactaccattcgtcagccgctgcttcacctaatcctgattctccgctgtcggatcatgttcgtgattcgggtcaggatggttacttgtctgatgacctggcccatgctagctgctccaccaatcgacgttgtgagagaaagaaaggtgtcccatggacagaagaggagcatcggttattcttaattggtcttcagaaattggggaaaggagactggcgtggaatagctcgaaactatgtggtgtctaggactcctacccaggtagcaagccatgctcagaaatatttcatccgccagactaatgccacacgaagaaagagacgctccagcctttttgacatggttcccgacatggccacagaaccccaatcagtaccagaagaacacgagttgccatcaggtcagttgggagatactgataatgcagatgcactaccttcactgaacctttcttttaagccagaatgtgaacccatggaaactgcatctgaagagcctgctgaagaacctgaggaaatgctgactgggtctagtgagttgaaacaaactgaacacagattaagtgaattcgcaccagctgtacctcagttaagtgaattcacaccatttatttctggattctacccagcttatatgccgataccttatccattttggtctacaaatactgccattcctgaagaagcaaatactgtagagacatcaaatcatcaagtcctaaaaccagttccaatatttccgaaggaacctgtcaatgtagacgaactggttggcatgtctcatcttagcataggagagatggagagagatcatagagagctatcacggctctccctgaaattaataggagagccatcaaggcagtctgcatttcatgcaaatgcttcagtcagtgggtctgacttgagccaaggcaaaggcagtcctatacaagcagtttga

SEQ ID NO: 161 - protein, 381 aa, Ricinus communis
MTRRCSHCSNNGHNSRTCPTRSSTCSSAAGSGSSSSSASSIAGVRLFGVRLTDGSIIKKSASMGNLSAHYHSSAAASPNPDSPLSDHVRDSGQDGYLSDDLAHASCSTNRRCERKKGVPWTEEEHRLFLIGLQKLGKGDWRGIARNYVVSRTPTQVASHAQKYFIRQTNATRRKRRSSLFDMVPDMATEPQSVPEEHELPSGQLGDTDNADALPSLNLSFKPECEPMETASEEPAEEPEEMLTGSSELKQTEHRLSEFAPAVPQLSEFTPFISGFYPAYMPIPYPFWSTNTAIPEEANTVETSNHQVLKPVPIFPKEPVNVDELVGMSHLSIGEMERDHRELSRLSLKLIGEPSRQSAFHANASVSGSDLSQGKGSPIQAV

SEQ ID NO: 162 - DNA, 951 bp, Sorghum bicolor
atgacgcggcggtgctcgcactgcagccacaacgggcacaactcgcggacgtgccccaaccgcggggtcaagatcttcggggtgcgcctcaccgatggctccgccatccgcaagagcgccagcatggggaacctctccctcctctccgcgggatccaccagcggcggcgcgtcccccgccgacgggcccgacctcgccgacggcggcgccgggggatacgcctccgacgacttcgtccagggctcctcctccgccagccgcgagcgcaagaaaggtgttccttggactgaagaagaacaccggaggtttttgctgggattacaaaagcttgggaaaggtgattggcgaggaatttctcgtaatttcgtggtctcaagaacacctactcaagtagcaagtcatgctcaaaaatattttatacgtcaatcaaatatgagcagaaggaagagaaggtctagcctttttgacatggtgcctgatgagtccatggaccttccaccccttcctggaagtcaagaaccagagacctcagtgttaaatcaagcaccactgccgcctcctgtggaggaggaggtggaatcaatggagtcagatacttctgctgttgcagagagttctacggcttctgctctcatgcccgagagtttacaacctaattatccgatgattgttccagcttatttctcaccgttcttgcaattctcagttcctttctggccaaatcaggaagatggaggcgatctgccccaagaaacacacgagattgtcaagcctgtggcagttcattccaagaatccaattaatgttgatgaacttgtgggcatgtcaaagctaagcataggggagcctggtcaggagacagtttctacttctctgtcgctaaatctgctagggggtcaaaataggcagtcggctttccatgcaaatcctcaaacgagagctcaagcctga

SEQ ID NO: 163 - protein, 316 aa, Sorghum bicolor
MTRRCSHCSHNGHNSRTCPNRGVKIFGVRLTDGSAIRKSASMGNLSLLSAGSTSGGASPADGPDLADGGAGGYASDDFVQGSSSASRERKKGVPWTEEEHRRFLLGLQKLGKGDWRGISRNFVVSRTPTQVASHAQKYFIRQSNMSRRKRRSSLFDMVPDESMDLPPLPGSQEPETSVLNQAPLPPPVEEEVESMESDTSAVAESSTASALMPESLQPNYPMIVPAYFSPFLQFSVPFWPNQEDGGDLPQETHEIVKPVAVHSKNPINVDELVGMSKLSIGEPGQETVSTSLSLNLLGGQNRQSAFHANPQTRAQA

SEQ ID NO: 164 - DNA, 1086 bp, Sorghum bicolor
atgacgcggaggtgctcgcactgcagcaacaacggccacaactcgcgcacctgccccgcccgctccggcggcggggtgaggctatttggcgtgcgcctcacaacggcgccggctccggcggcgatgaagaagagcgccagcatgagctgcatcgcgtcctcgctcgggggcgggtccgggggctcgtcgccgccggcgggaggagtgggtggtggcaggggaggaggagacggcggggccggctacgtctccgatgatcccgggcacgcctcctgctcgacgaatggccgcgtcgagcggaagaaaggtacaccttggactgaagaagagcatagaatgtttctgatgggtcttcagaagcttggtaagggagattggcgcgggatatctcgaaactttgttgtttccaggaccccgactcaagtggcaagccatgctcaaaagtactttattagacagacaaactcatcaagacggaagaggcggtcaagcttgtttgacatggttgcagaaatgccagtagacgagtccctagctgctgcggaacaaattactatccaaaatactcaagatgaagctgcaagttcaaatcaactgccgaccttacatcttgggcatcagaaggaagcagagtttgctaagcaaatgccaacttttcagctaaggcagcatgaggaatctgaatatgcagaaccttcattgacattaccagatttagagatgaactccagtgtaccattcaataccatagctgttccgacgatgccagcattctaccctgcgttggtccctgttccactaactctttggcctccaagtgttgcccatgtggaggacgcaggcacaacccatgaaatcctaaaaccaactcctttgaatggtaaggaggtgattaaagcagatgatgttgttggtatgtctaagctcagcattggtgaggccagctctggctccatggaacccacagctctttcccttcagcttattggatcgacagatacaaggcagtcagcttttcatgtgagtccaccaatgaatagacctgaactaagcaagagaaacagcagtccaattcatgccgtttga

SEQ ID NO: 165 - protein, 361 aa, Sorghum bicolor
MTRRCSHCSNNGHNSRTCPARSGGGVRLFGVRLTTAPAPAAMKKSASMSCIASSLGGGSGGSSPPAGGVGGGRGGGDGGAGYVSDDPGHASCSTNGRVERKKGTPWTEEEHRMFLMGLQKLGKGDWRGISRNFVVSRTPTQVASHAQKYFIRQTNSSRRKRRSSLFDMVAEMPVDESLAAAEQITIQNTQDEAASSNQLPTLHLGHQKEAEFAKQMPTFQLRQHEESEYAEPSLTLPDLEMNSSVPFNTIAVPTMPAFYPALVPVPLTLWPPSVAHVEDAGTTHEILKPTPLNGKEVIKADDVVGMSKLSIGEASSGSMEPTALSLQLIGSTDTRQSAFHVSPPMNRPELSKRNSSPIHAV

SEQ ID NO: 166 - DNA, 1152 bp, Sorghum bicolor
atgacgcgggacggcgtgcctccggcggcgcccccgccggtggccggctccggctctggcggcgcggtggcggcggcgggcgacgggcccaggcggtgctcgcagtgcgggcaccacgggcacaacgcgcgcacctgcaccgcgcggcccgtcaagctcttcggcgtgcgcatcggggacaagcccatccggaagagcgccagtatggggaacatcgcgcacctcgctgcggagggcagcggaggaggaggaggcggcggcggtagcagggaggaagggtacggctccgatggggagcgtccgcacaagaagcgaggtgaggcatggactgaagaggagcacaagaagtttctacttggcttgaataagctagggaaaggtgattggcgtggtatatcccgcaattatgttatttcaaggacacctactcaagtggctagccatgcacaaaagtatttcaatcgccaaacaaatgtgcatagaagaaagagaagatcaagcctattcgatatggtgattgatgactcgcctgatcagcttccgctctcacgttcatcgtcacaagaagtggagcagcaacatttagatgatccacagcctgttgcagccctgcctgcccctgtggtctctccagctactgtggtacctccttctgttcctgtggaagtgcctgcttcagttccagcgcccgttcaagtcccagttccagttccagctcaagtggtgacatctcagcctatggagcaggactcggttgcctcaagttcaagtgctggagaggcaggggctgtgatgccaggagccatgcccccctatctttatccaatgatgattcctcctccctactaccatcctgcatttgttccagtgccctgctacggttatgttccgttttactatgggccaccaggtgttgcacaagctccacatgaggttgtcaagccagtggctgtgcactcaacacccccattaaacgtcaaagacctttacaatatgtctgaattgagcctgaagggtgactcagatgcaaatggtggagtgcctgcttctcccttgcctccaaagccaattggtggaccagagaggcaatctgctttccatggaaaaggtaccagtggctcgtcaggcggactaattcctgcagtcaagtga

SEQ ID NO: 167 - protein, 383 aa, Sorghum bicolor
MTRDGVPPAAPPPVAGSGSGGAVAAAGDGPRRCSQCGHHGHNARTCTARPVKLFGVRIGDKPIRKSASMGNIAHLAAEGSGGGGGGGGSREEGYGSDGERPHKKRGEAWTEEEHKKFLLGLNKLGKGDWRGISRNYVISRTPTQVASHAQKYFNRQTNVHRRKRRSSLFDMVIDDSPDQLPLSRSSSQEVEQQHLDDPQPVAALPAPVVSPATVVPPSVPVEVPASVPAPVQVPVPVPAQVVTSQPMEQDSVASSSSAGEAGAVMPGAMPPYLYPMMIPPPYYHPAFVPVPCYGYVPFYYGPPGVAQAPHEVVKPVAVHSTPPLNVKDLYNMSELSLKGDSDANGGVPASPLPPKPIGGPERQSAFHGKGTSGSSGGLIPAVK

SEQ ID NO: 168 - DNA, 1029 bp, Solanum lycopersicum
atgacccgtcgatgttcacattgcagtaccaatggccataactcaaggacttgtcctaatagaggtgtgaagttgtttggggtccgattgactgatgggttgattcgaaaaagtgctagtatgggtaatttgtcccattttgccagtggaagtggaggtggtagtacacctctaaacggtgtcgttcatgactcacctggtgatacacctgatcatcctgctgctgctggtggctctgttgatggttatgcttcagaggattttgttgctggttcttcatctagccgtgaaaggaagaaaggggttccctggactgaggaggagcataggatgtttctacttggtttgcaaaaactcggtaaaggtgattggcgtggaattgctcgtaactatgtgatctctagaacgcccacccaggttgcaagccacgcccagaaatatttcattaggcaaagtaatatgtcaaggagaaaaagacgctccagtctgtttgatattgttgctgatgaatcaggggacactccaatggtatcgagggatttcctcgcagatgatcctgcacaagctgagatgcaaagcaacaatccgttgcctcctactcctgctgtggatgaagaatgtgaatcaatgggttcagcagcttctgccaactccatcgatggggaacatgctctttctataccagaaagctcacaatatcagcatccacttgtttatcctgcttatgttgctccattttacccgatgccttatccatgctggccaggttacactgcagagccagcaatagcagagacccatgaagttctgaagccaacagctgttcattcaaagagtccaattaatgttgatgagctggttggtatgtcaaagctaagcttaggtgagtccattggtgatgctgccaagccaccttctctgtcactaaagctggtcgagggctcctccaggcagtcagctttccatgctaatccgtcatctggtagctcaggcatgaactctagccacaatccaatccatgcagtttag

SEQ ID NO: 169 - protein, 342 aa, Solanum lycopersicum
MTRRCSHCSTNGHNSRTCPNRGVKLFGVRLTDGLIRKSASMGNLSHFASGSGGGSTPLNGVVHDSPGDTPDHPAAAGGSVDGYASEDFVAGSSSSRERKKGVPWTEEEHRMFLLGLQKLGKGDWRGIARNYVISRTPTQVASHAQKYFIRQSNMSRRKRRSSLFDIVADESGDTPMVSRDFLADDPAQAEMQSNNPLPPTPAVDEECESMGSAASANSIDGEHALSIPESSQYQHPLVYPAYVAPFYPMPYPCWPGYTAEPAIAETHEVLKPTAVHSKSPINVDELVGMSKLSLGESIGDAAKPPSLSLKLVEGSSRQSAFHANPSSGSSGMNSSHNPIHAV

SEQ ID NO: 170 - DNA, 528 bp, Selaginella moellendorffii
atggcgcggaggtgctcgcattgtggccacaatggccacaactcgaggacgtgtccggatcgcggcatccggttgtttggcgtgaggctcacgatgaaggccacggacggcgcgagcggcgtagcgatgcggaggagcgccagcgcggggaatttggtgacaatgcaagcaatcgcgacgccgacgagcagctccgcggtcgcgtcggagcaatctgagtcgggcggcgatggctacgcctcggatgggctcgtccaggcgtcgagctacgcgagagcgaggaagaaaggtgttccgtggagggaggaagaacaccggctgttcttggtgggtctccacgccctggggaaaggagattggcgggggatctcgaggaattacgtgacgagcaggacgccgacgcaggtcgcgagccacgcgcagaagtatttcatccgccagagcaatctcaccaagcgcaagcgccgctccagcttgtttgacatctccccagaggtaagaagaagcatccacttgttcttccactga

SEQ ID NO: 171 - protein, 175 aa, Selaginella moellendorffii
MARRCSHCGHNGHNSRTCPDRGIRLFGVRLTMKATDGASGVAMRRSASAGNLVTMQAIATPTSSSAVASEQSESGGDGYASDGLVQASSYARARKKGVPWREEEHRLFLVGLHALGKGDWRGISRNYVTSRTPTQVASHAQKYFIRQSNLTKRKRRSSLFDISPEVRRSIHLFFH

SEQ ID NO: 172 - DNA, 1128 bp, Solanum tuberosum
atgactcggcggtgttcccattgcaacaacaatggccacaattcccggacttgtcctaccagaggtggcgtcaccggcggtgtcggtggtggtagctccggcggcggaggtgtgcggttgtttggtgttaggcttacggatgggtctatcatgaagaaaagtgcgagcatgggaaatctatcctcccttcactatcattcttcttcttccgctgctgcttcgcctaatcctggttctccttcttctgatgttcttcgtgaatctgttcatttgactgatggttatctctctgatgatcctgctcatgctttgtgttctgcaaatcatagaattgaaaggaaaaaaggcattccgtggacagaggaagagcaccggcttttcttgattggtctacaaaaattgggcaaaggagattggcggggtatatcgcgaaactttgtgacgtcaagaactcctacccaagtagctagccatgcccagaagtattttattcggcagagtaatgctactcggagaaagagaagatccagtctttttgacattgttgctgatacggctgctgatgcttcccatccacttcctgaagaacaatttatgctcccacctagagcaatggaaagtgacaaggaacagttagcaccctctgcaacaaaagcaatagaaactgattttacagattcactcccttccttagatctttctctcaagtcagattttgaatccatggaaaccgctccaagtgaacctgtagaagaaacgaaaccaaatatcacaaccagtgagattccttcagtatttccagcattcttcccagcttacattccagttccatatcccttctggccatcaaatgcttttccagtccctgaagataaaggagcagaaccatcccatcatcagatcctcaagccaattccatccgtccctaaagagcccgtgaatgtagatgaactagtgggtatgtcccagctcactttagcagacactggttctggccatattgagccttcaccactctcccttaagctaacagcagaaccatcacgacaatcagcttttcatgctagcacaccagtcaaaagctcagagattaccaagggtgaaactgctccgattcaagcactttaa

SEQ ID NO: 173 - protein, 375 aa, Solanum tuberosum
MTRRCSHCNNNGHNSRTCPTRGGVTGGVGGGSSGGGGVRLFGVRLTDGSIMKKSASMGNLSSLHYHSSSSAAASPNPGSPSSDVLRESVHLTDGYLSDDPAHALCSANHRIERKKGIPWTEEEHRLFLIGLQKLGKGDWRGISRNFVTSRTPTQVASHAQKYFIRQSNATRRKRRSSLFDIVADTAADASHPLPEEQFMLPPRAMESDKEQLAPSATKAIETDFTDSLPSLDLSLKSDFESMETAPSEPVEETKPNITTSEIPSVFPAFFPAYIPVPYPFWPSNAFPVPEDKGAEPSHHQILKPIPSVPKEPVNVDELVGMSQLTLADTGSGHIEPSPLSLKLTAEPSRQSAFHASTPVKSSEITKGETAPIQAL

SEQ ID NO: 174 - DNA, 1029 bp, Solanum tuberosum
atgacccgtcgatgttcacattgtagtaccaatggacataactcaaggacttgtcctaatagaggtgtgaagttgtttggggtccgattgactgatgggttgatccgaaaaagtgctagtatgggtaatttgacccattttgctagtggaagtggaggtggtagtacacctctaaacggtgtcgttcatgactcacctggtgatacacctgatcatcctgctgtcggtggtggctctgctgatggttatgcttcagaggattttgttgctggttcttcatctagccgtgaaaggaagaaaggggttccctggactgaggaggagcataggatgtttctacttggtttgcaaaaactcggtaaaggtgattggcgtggaattgctcgtaactatgtgatctctagaacgcccacccaggtggcaagccacgcccagaaatatttcattaggcaaagtaatatgtcaaggagaaaaagacgctccagtctgtttgatattgttgctgatgaatcgggggacactccaatggtatcaagggatttcctcgcagatgatcctgcacaagctgagatgcaaagcaacaatctgttgcctcctactcctgctgtggatgaagaatgtgaatcaatgggttcagcagcttctgccaactccatcgatggggaacatgctcttcctataccagaaagctcacaatatcagcatccacttgtttatcctgcttatgttgctccattttacccgatgccttatccatgctggccaggttacactgcagagccagcaatagctgagacccatgaagttctgaagccaacagctgttcattcaaagagtccaattaatgttgatgagctggttggtatgtcaaagctaagcttaggtgaatccattggtgatgctgccaagccaccttctctgtcactaaagctggtcgagggctcctccaggcagtcagctttccatgctaatccgtcatctggtagctcaggcatgaactctagccacaatccaatccatgcagtttag

SEQ ID NO: 175 - protein, 342 aa, Solanum tuberosum
MTRRCSHCSTNGHNSRTCPNRGVKLFGVRLTDGLIRKSASMGNLTHFASGSGGGSTPLNGVVHDSPGDTPDHPAVGGGSADGYASEDFVAGSSSSRERKKGVPWTEEEHRMFLLGLQKLGKGDWRGIARNYVISRTPTQVASHAQKYFIRQSNMSRRKRRSSLFDIVADESGDTPMVSRDFLADDPAQAEMQSNNLLPPTPAVDEECESMGSAASANSIDGEHALPIPESSQYQHPLVYPAYVAPFYPMPYPCWPGYTAEPAIAETHEVLKPTAVHSKSPINVDELVGMSKLSLGESIGDAAKPPSLSLKLVEGSSRQSAFHANPSSGSSGMNSSHNPIHAV

SEQ ID NO: 176 - DNA, 945 bp, Triticum aestivum
atgaccaggcggtgctcgcactgcagccacaacggccacaactcgcggacgtgccccaaccgcggggtcaagatcttcggggtgcgcctcaccgatggatccatccgcaagagcgccagcatggggaacctctccctgctcgggggatccaccagcggcggcggcggcgcatcccccgctgacgtcggccacgacgccgccgcagagggctacgcctccgacgacttcgtgcagggatcatcatccgccaaccgcgagcgcaagaaaggggttccttggactgaagaagaacatcggagatttttgcttggactgcaaaagcttggaaagggtgattggcgaggaatctctcgtaattttgtggtctcaagaacacctactcaagtagcaagccatgctcagaaatattttatacgccaagccaatatgagcagaaggaagagaaggtctagcctctttgatttggtgcctgatgagtcagacctgccacccctacctggtaatcaagaacctgaggcccagatattaaatcacccaccattacctccacccatggaggaggaggaggtagaatctatggagtcagatacttctgtcattgcagagagttcttcagcttctgctatcatgcctgagaatttgcagtcgagctatccggtgctagttccagcatatttctcaccattcttgcaattctcagttcctttctggcaaaatcagaatgatggagatgatcttggacaaggaacacatgagattgttaagcctgttccggttcattcaaagagtccaatcaatgttgatgaactggtgggcatgtcgaagctaagcataggggatcccaagcaagatacagtatctacctctctttccttaaaaatggtaggaggtcaaaatagacaatcggctttccaggcgaatctcccaacgagggctcaggcgtga

SEQ ID NO: 177 - protein, 314 aa, Triticum aestivum
MTRRCSHCSHNGHNSRTCPNRGVKIFGVRLTDGSIRKSASMGNLSLLGGSTSGGGGASPADVGHDAAAEGYASDDFVQGSSSANRERKKGVPWTEEEHRRFLLGLQKLGKGDWRGISRNFVVSRTPTQVASHAQKYFIRQANMSRRKRRSSLFDLVPDESDLPPLPGNQEPEAQILNHPPLPPPMEEEEVESMESDTSVIAESSSASAIMPENLQSSYPVLVPAYFSPFLQFSVPFWQNQNDGDDLGQGTHEIVKPVPVHSKSPINVDELVGMSKLSIGDPKQDTVSTSLSLKMVGGQNRQSAFQANLPTRAQA

SEQ ID NO: 178 - DNA, 1176 bp, Triticum aestivum
atgacgcgggacggcgtgccaccggcggcgcctgccggcggcggtgcgggggacgggccgaggcggtgctcgcagtgcgggcaccacgggcacaactcccgcacgtgcacggcgcgccccgtgaagctcttcggcgtgcgcatcggcgacaagccaatcaggaagagcgtcagcatgggcaacctcgcgcagctcgcggagggtagcggcggtgccagggccgaggggtacggctccgagggcgacgacgacaaaccccacaggaagcgaggtgagtcatggtcagaagaggagcacaaaaattttctacttggattgaacaaattaggaaaaggtgattggcgtggcatatcccgtaattatgttgtctcgaggacacctactcaagttgctagccatgctcagaagtatttcattcgccaaacaaatgttaataggagaaagagaagatcaagcctcttcgatatggttattgaggatcctggtgaccagccactctcccgttcatcgtcacaagagatgccgctctcccgttcatcttcacaagatgtagaagagttcgtagatgatctacggcctgttactgctcctgtgacaccacccgctcctatgcccgtgataacatctgtttccgtcccaccaccagtgccagtaatggcaccacctgctcctgtgcctatgctaacatatgcatcagccccatcgccagttctagcaatggcacatcaacctcagggcaatgaatcggctggttcaagttcaattgctggagaagcagggatggtgatgccacaagtgatgcccccatatggttatcctcctccaatgatgattcctgcacctcactatgtccaagcagtttttccgtatccatactatggctatgctccaatgttctatgggccaccagtctctatgcaagcatcatcaccagttacagtacaagcatcacatgagcctgtcaggcctgttgctgtccactcagctcccccggtaaatgttgaagacctgtacaacatgtccaaactcaacctgaagggtgactcaagtaccagcggtgttgcgcctaacttggcgttgcctccaaatccaaacgggagaccagagaggcaatctgctttccatggaaaaggggctgagaatggctcatcgaacggactaatcccgacaaaatga

SEQ ID NO: 179 - protein, 391 aa, Triticum aestivum
MTRDGVPPAAPAGGGAGDGPRRCSQCGHHGHNSRTCTARPVKLFGVRIGDKPIRKSVSMGNLAQLAEGSGGARAEGYGSEGDDDKPHRKRGESWSEEEHKNFLLGLNKLGKGDWRGISRNYVVSRTPTQVASHAQKYFIRQTNVNRRKRRSSLFDMVIEDPGDQPLSRSSSQEMPLSRSSSQDVEEFVDDLRPVTAPVTPPAPMPVITSVSVPPPVPVMAPPAPVPMLTYASAPSPVLAMAHQPQGNESAGSSSIAGEAGMVMPQVMPPYGYPPPMMIPAPHYVQAVFPYPYYGYAPMFYGPPVSMQASSPVTVQASHEPVRPVAVHSAPPVNVEDLYNMSKLNLKGDSSTSGVAPNLALPPNPNGRPERQSAFHGKGAENGSSNGLIPTK

SEQ ID NO: 180 - DNA, 1008 bp, Vitis vinifera
atgactcgccgctgctcgcattgcagtcacaacgggcacaattccaggacatgccccaaccgcggggtcaagatcttcggggttcgattgactgatgggttgatccgtaagagtgctagtatgggcaatctcagccactacgccgggtcgacctctggtcatcatcagaacggcgtttccggtaacaattcggtctctcccggagagactccagagcacggcgccgcggccgatggatacgcctccgagggtttcgttcccggttcatcatccagccgggagcgcaagaaaggcactccatggactgaagaggaacacagaatgtttctacttggactgcagaagcttggaaaaggggattggcgtggaatttcacgtaattatgttatatcaaggacacctactcaagtcgccagccatgctcagaaatatttcatcaggcaaactaatgtgtctaggagaaaaagacggtccagcttgtttgatattgtagctgatgaatctgtcgacactccaatggtatcacgggatttcttctccaccaacccttcgcaagctgaaacactaagcaataacccattgcctgttcctccggctctggatgaagaatgtgaatcaatggattctaccaactcgaatgatggagaaccgcccattccaaagccggatggcttacaaggctgtcccccagtaatatatcctacttatttctcaccattcttcccattttcttttccattctggccgggaaacagttcagagccaactaaaatggagactcatgaggtgcttaagccaacagctgtacattctaagagtccaatcaatgttgatgagctggttggcatgtcaaaactgagtttaggagaatccatcggtcatgctggtccctcctctctcacactgaaactgcttgaagggtcaagcaggcaatctgctttccatgctaatccagcctctggcagttcaagcatgaactcgagcggcagtccaatccatgcagtttga

SEQ ID NO: 181 - protein, 335 aa, Vitis vinifera
MTRRCSHCSHNGHNSRTCPNRGVKIFGVRLTDGLIRKSASMGNLSHYAGSTSGHHQNGVSGNNSVSPGETPEHGAAADGYASEGFVPGSSSSRERKKGTPWTEEEHRMFLLGLQKLGKGDWRGISRNYVISRTPTQVASHAQKYFIRQTNVSRRKRRSSLFDIVADESVDTPMVSRDFFSTNPSQAETLSNNPLPVPPALDEECESMDSTNSNDGEPPIPKPDGLQGCPPVIYPTYFSPFFPFSFPFWPGNSSEPTKMETHEVLKPTAVHSKSPINVDELVGMSKLSLGESIGHAGPSSLTLKLLEGSSRQSAFHANPASGSSSMNSSGSPIHAV

SEQ ID NO: 182 - DNA, 954 bp, Zea mays
atgacgcggcggtgctcgcactgcagccacaacgggcacaactcgcggacgtgccccaaccgcggggtcaagatcttcggggtgcgcctcaccgatggctcggccatccgcaagagcgcaagcatggggaacctctccctcctctccgcggggtcaaccagcggcggcgcgtcgcccgccgacgggcccgacctcgccgacggcggcgggggctacgcctccgacgacttcgtccaggggtcgtcctccgccagccgcgagcgtaagaaaggtgttccttggactgaagaagaacaccggaggtttttgctgggattacaaaagcttgggaaaggtgattggcgagggatttctcgtaatttcgtggtctcaagaacacctactcaagtagcaagtcatgctcaaaaatattttatacgtcaatcaaatatgagcagaaggaagagaaggtctagcctttttgacatggtgcctgatgagtccatggaccttccaccccttcctggaagtcaagagccagagacctcagtgttaaatcaaccaccactgcctccccctgtggaggaggaggaggaggtggaatcgatggagtcagatacttctgctgttgcggagagttctgcagcttcagctcttatgcccgagagtttacagcctacctatccgatgattgttccagcttatttctcaccgttcttgcaattctcagttcctttctggccaaatcaggaagatggaggtgatctgcctcaagaaacgcacgagattgtcaagcctgttgcagttcattccaagaatccaattaatgttgatgaacttgtgagcatgtcaaagctaagcataggggagcctggtcaggaaacggtgtctacttctctgtcgttaaatctgctggtgggtcaaaataggcagtcggccttccatgcaaatcctcaaacgagggctcaagcttga

SEQ ID NO: 183 - protein, 317 aa, Zea mays
MTRRCSHCSHNGHNSRTCPNRGVKIFGVRLTDGSAIRKSASMGNLSLLSAGSTSGGASPADGPDLADGGGGYASDDFVQGSSSASRERKKGVPWTEEEHRRFLLGLQKLGKGDWRGISRNFVVSRTPTQVASHAQKYFIRQSNMSRRKRRSSLFDMVPDESMDLPPLPGSQEPETSVLNQPPLPPPVEEEEEVESMESDTSAVAESSAASALMPESLQPTYPMIVPAYFSPFLQFSVPFWPNQEDGGDLPQETHEIVKPVAVHSKNPINVDELVSMSKLSIGEPGQETVSTSLSLNLLVGQNRQSAFHANPQTRAQA

SEQ ID NO: 184 - DNA, 1113 bp, Zea mays
atgatgcgggacggcgtgcctccgtcggtggccggctccggcggcgcggcgggcggcgacgggcccaggcgatgctcgcagtgcgggcaccacgggcacaacgcgcgaacctgcacggcgcggcccgtcaagctcttcggcgtgcgcatcggggacaagcccatccggaagagcgccagcatggggaacatcgcgcacctcgccgcggagggcagcggcggcagggaggaagggtacggctccgacggggagcgcccgcacaagaagcgaggtgaggcatggactgaagaggagcacaagaagtttctgcttgggttgaataagctagggaaaggcgattggcgtggtatatcccgtaaatatgttgtttcaaggacacctactcaagtggctagccatgcgcaaaagtatttcaatcgccaaacaaatgtgcatagaagaaagagaagatcaagcctattcgatatggtgattgatgacccgtctgatcaacttccgctctcgcgttcatcttcacaagaaatggagcagcaacatttagatgatccacagcctgttgcagccctgcctgcacctgtggtctctccagctactgtggtacctcctgtgcctgtggaagtgtctgcttcagttccatcgccagttcaggtcccagttccagtttcagccccagtgatgacatctcagcctatggaacaggactcagataccacaagttcaattgctggagaggcaggaacggtgatgccaggagccatgcccccctatctttatccaatgatgattcctcctccatactaccatactgcttttgtaccaatgccctgctacggttatgttcctttttactgtgagccacaaggtgctgcacaggctccgcatgaggttgtcaagccagtggctgttcattcaacgcctccactgaatgccaaagacctttacaacatgtttgaattgagcctgaagggcgactcgaatgcaaacggtggtgtgcctgcttcccccttgcctccgaagccgatcggtagaccagagaggcaatctgctttccatggcaaaggacctacacctaccggtggctcgtcaggtggactgattcctgcagtcaagtga

SEQ ID NO: 185 - protein, 370 aa, Zea mays
MMRDGVPPSVAGSGGAAGGDGPRRCSQCGHHGHNARTCTARPVKLFGVRIGDKPIRKSASMGNIAHLAAEGSGGREEGYGSDGERPHKKRGEAWTEEEHKKFLLGLNKLGKGDWRGISRKYVVSRTPTQVASHAQKYFNRQTNVHRRKRRSSLFDMVIDDPSDQLPLSRSSSQEMEQQHLDDPQPVAALPAPVVSPATVVPPVPVEVSASVPSPVQVPVPVSAPVMTSQPMEQDSDTTSSIAGEAGTVMPGAMPPYLYPMMIPPPYYHTAFVPMPCYGYVPFYCEPQGAAQAPHEVVKPVAVHSTPPLNAKDLYNMFELSLKGDSNANGGVPASPLPPKPIGRPERQSAFHGKGPTPTGGSSGGLIPAVK

SEQ ID NO: 186 - DNA, 1104 bp, Zea mays
gataactaaaaagtcgttacaaagtacatggtcacgttctgaggtattgagaccatcagtataatttgtaagacttgacccagcgggcatgtttcatgcttcctcaaactgcatgaattggactgctgtttctcttgcttagttcaggtctattcatcggtggactcacatgaaaagctgattgccttgtatctgtggatccaataagctcaagggaaagagcagtgggttccatggagccagagctagcttcgtcgatgctgagcttagacataccaacaacatcatctgccttaaccacccccttaccattcaaaggagttggttttaggatttcatgggttctggctgcttcctccacgtgggaaacacttggaggccaaagagttagtggaacagggaccaatgatgggtagaatgctggtcctgttggatcagttatggtcttgaatggtacactggggttcatctccaaatctgatagcagcaatgaaggttctgcgtattcagatttctcatggtgccctggctgaaaagtttgtagctgcttagcaaactctgtttccttccgtggtccaagatgtaaggttggcacgtgatttgaacttgtatcttcatcttgagtattttggagagtaaattgttccacagcagctggggactcatccattggcatttctgggaccatgtcaaataagcttgaccgcctcttccgtctcgatgagtttgtctgtctaacaaagtacttttgagcatggcttgcaacttgagtcggggtcctggaaacaacaaagtttctggatatcccgcgccagtctcccttaccaagcttctgcagacccatcagaaacattctatgctcttcttcagtccaaggtgtacctttcttgcgctcggcgcggccattcgtcgagcaggatgcgtgcgcgggatcatcggacacgtagccggtcccactgtcttcccctcctctgccagcacccactccttccaccggcggcgacgagccgccgaaaccgccgccgagcgaggacacaatgcagctcatgctggcgctcttcttcatcaccgccggcgccggcgccgtcgtgagccgcacgccga

SEQ ID NO: 187 - protein, 367 aa, Zea mays
MTRRCSHCSNNGHNSRTCPVRSAGGGSGGGGVRLFGVRLTTAPAPAVMKKSASMSCIVSSLGGGFGGSSPPVEGVGAGRGGEDSGTGYVSDDPAHASCSTNGRAERKKGTPWTEEEHRMFLMGLQKLGKGDWRGISRNFVVSRTPTQVASHAQKYFVRQTNSSRRKRRSSLFDMVPEMPMDESPAAVEQFTLQNTQDEDTSSNHVPTLHLGPRKETEFAKQLQTFQPGHHEKSEYAEPSLLLSDLEMNPSVPFKTITDPTGPAFYPSLVPVPLTLWPPSVSHVEEAARTHEILKPTPLNGKGVVKADDVVGMSKLSIDEASSGSMEPTALSLELIGSTDTRQSAFHVSPPMNRPELSKRNSSPIHAV

SEQ ID NO: 188 - protein, 40 aa, Artificial sequence
  motif 1
  VARIANT (7)..(7): / replace = "Lys"
  VARIANT (8)..(8): / replace = "Thr"
  VARIANT (11)..(11): / replace = "Glu" / replace = "Asp"
  VARIANT (14)..(14): / replace = "Arg" / replace = "Lys"
  VARIANT (15)..(15): / replace = "Lys"
  VARIANT (25)..(25): / replace = "Ala"
  VARIANT (27)..(27): / replace = "Gly"
WTEEEHRKFLAGLEQLGKGDWRGISKNASHAQKYFLRQTN

SEQ ID NO: 189 - protein, 21 aa, Artificial sequence
  motif 2
  VARIANT (2)..(2): / replace = "Asn"
  VARIANT (3)..(3): / replace = "Met"
  VARIANT (8)..(8): / replace = "Ser"
  VARIANT (13)..(13): / replace = "Met"
  VARIANT (14)..(14): / replace = "Met"
  VARIANT (15)..(15): / replace = "Pro" / replace = "Ala"
  VARIANT (16)..(16): / replace = "Arg" / replace = "Pro"
  VARIANT (17)..(17): / replace = "Glu" / replace = "Ala"
  VARIANT (18)..(18): / replace = "Gly" / replace = "Tyr"
  VARIANT (19)..(19): / replace = "His" / replace = "Lys"
  VARIANT (20)..(20): / replace = "Asp"
  VARIANT (21)..(21): / replace = "Asn" / replace = "Thr" / replace = "Tyr"
PGKKKRRASLFDVGIADLSPA

SEQ ID NO: 190 - protein, 21 aa, Artificial sequence
  motif 3
  VARIANT (1)..(1): / replace = "Leu" / replace = "Ala"
  VARIANT (2)..(2): / replace = "Gly" / replace = "Ser"
  VARIANT (3)..(3): / replace = "Ser" / replace = "Thr"
  VARIANT (4)..(4): / replace = "Met" / replace = "Pro"
  VARIANT (6)..(6): / replace = "Ser" / replace = "Gln"
  VARIANT (7)..(7): / replace = "Ser"
  VARIANT (8)..(8): / replace = "Gly"
  VARIANT (9)..(9): / replace = "Lys"
  VARIANT (12)..(12): / replace = "Arg"
  VARIANT (15)..(15): / replace = "Asp"
  VARIANT (19)..(19): / replace = "Ala"
  VARIANT (20)..(20): / replace = "Val"
GALGQQKRRRRKAQERKKGIP

SEQ ID NO: 191 - protein, 50 aa, Artificial sequence
  motif 4
  VARIANT (8)..(8): / replace = "Leu"
  VARIANT (25)..(25): / replace = "Ala"
  VARIANT (28)..(28): / replace = "Phe"
  VARIANT (30)..(30): / replace = "Ile" / replace = "Thr"
  VARIANT (31)..(31): / replace = "Thr"
  VARIANT (49)..(49): / replace = "Thr"
WTEEEHRMFLLGLQKLGKGDWRGISRNYVVSRTPTQVASHAQKYFIRQSN

SEQ ID NO: 192 - protein, 15 aa, Artificial sequence
  motif 5
  VARIANT (1)..(1): / replace = "Lys"
  VARIANT (11)..(11): / replace = "Ile"
  VARIANT (13)..(13): / replace = "Pro"
  VARIANT (15)..(15): / replace = "Asp"
RRKRRSSLFDMVADE

SEQ ID NO: 193 - protein, 15 aa, Artificial sequence
  motif 6
  VARIANT (7)..(7): / replace = "Gly"
  VARIANT (8)..(8): / replace = "Asn"
RRCSHCSHNGHNSRT

SEQ ID NO: 194 - protein, 7 aa, Artificial sequence
  motif 7
SHAQKYF

SEQ ID NO: 195 - DNA, 56 bp, Artificial  sequence
  primer: prm07263
ggggacaagtttgtacaaaaaagcaggcttaaacaatggagacaaattcgtctgga

SEQ ID NO: 196 - DNA, 53 bp, Artificial  sequence
  primer: prm07264
ggggaccactttgtacaagaaagctgggtgaaaatagagtctcatgtggaagc

SEQ ID NO: 197 - DNA, 2194 bp, Oryza sativa; identical to SEQ ID NO: 43

SEQ ID NO: 198 - DNA, 1236 bp, Oryza sativa
tttgtacaaaaaagcaggcttaaacatggcggcgggggcgcacgcgtcgcgcgcttcggctccgatcattgcaggtctcacaggtgctcttcgagcagcatataaaggattttctcctcagttatgcaacttccatgcgtcagtaaataatggacttctccacagaaggaaaatacaactccattttatatgctcttttcgctccatacaagcaagatataaccattcgtcagctgttgcacctaaggactattgcgaaacttacatccagtttctaagagataaacagatagttcctgattcagatcctccaagtgctaaggatgtggacctactttaccggtttattgatcagagtaaaaaactcatggtgttaactagagcaggaatgagcactgaatcaggaattcctgattataggagccctaatggtgcttacagttctggttttaaaccacttactcatcaggagtttgttcgttctattcgagcccgaaggcggtactgggctaggagctatgctggatggagaaggttcaggagagcacaaccaaactcagcccattatgctcttgcatcactggagagaattggccgggtacactcaatggttactcaaaacgtggataggttgcatcatcgtgctgggagtaagccagttgaattgcatggaagtgtgtatgaggtagcatgtttagactgtggtacatccattgcccgagaatcattccaggagcaggtcaaggacctcaacccaaagtgggctctagctattgacagtttggaagtaggacaaccgggctcagacaaaagtttcggaatgcagcagcgacctgatggtgatattgagattgatgagaagttctgggagcaagattttgatattcctagttgcaaccagtgtggtggagtgctgaaacctgatgttgtgatgtttggtgataatgttcctgaagagagagctgaaagcactaaggaggctgcaagaaattgtgatgctcttctagtggttggttcagcactaatgacaatgtctgcttttaggctcgcaaggcttgcacatgaagcgaatgctccaattgcggcgatcaccattggtgagaccagggctgatagtattttatccttgaaaattaatgcaagatgtggggagatactgcccagaatacttcagatgggaagtctagctgtaccaaacgtaagttaagctggtgcacccagctttcttgtacaaag

SEQ ID NO: 199 - protein, 393 aa, Oryza sativa
MAAGAHASRASAPIIAGLTGALRAAYKGFSPQLCNFHASVNNGLLHRRKIQLHFICSFRSIQARYNHSSAVAPKDYCETYIQFLRDKQIVPDSDPPSAKDVDLLYRFIDQSKKLMVLTRAGMSTESGIPDYRSPNGAYSSGFKPLTHQEFVRSIRARRRYWARSYAGWRRFRRAQPNSAHYALASLERIGRVHSMVTQNVDRLHHRAGSKPVELHGSVYEVACLDCGTSIARESFQEQVKDLNPKWALAIDSLEVGQPGSDKSFGMQQRPDGDIEIDEKFWEQDFDIPSCNQCGGVLKPDVVMFGDNVPEERAESTKEAARNCDALLVVGSALMTMSAFRLARLAHEANAPIAAITIGETRADSILSLKINARCGEILPRILQMGSLAVPNVS

SEQ ID NO: 200 - DNA, 1397 bp, Arabidopsis thaliana
aaaacgcaaaactgaagaaatctcgtttcatccgccattaacgacctctcaagtgaaattgtgatcatagattcatctctgcgatttattaggctttctatgaacatgagaagagtgtttggaggtgtatctacagatttgtttccgtcgcgaagtatgtaccggccgctgcagtctgggggaaacttggttatgttgtttaaaggatgcagacggtttgtgagaacaacgtgtcgcgtttcgatccctggtggttctttggggaatgaatcaaaagcacctccaaggtttctgagggatagaaagattgttccagatgctgatccccccaatatggaagatatccacaagttgtatcgactttttgagcaaagctcgagactcaccatcttgactggagctggggttagcacagaatgtggaattccggattacagaagtcccaatggagcatacagttctggtttcaaaccaattacccatcaggagtttactcgatcaagccgagctcgtaggcggtattgggcgaggagttacgctggatggaggaggttcactgcagcacaaccaggaccagctcatactgctttagcatcactagaaaaagctggacgaataaattttatgatcacacaaaatgttgacaggttgcatcatcgtgctgggagcgatccacttgaattacatggcacagtatatactgttatgtgcttagagtgcggcttctcttttccccgagacttgtttcaggatcagctaaaagcaatcaatcctaagtgggctgaagctatagaaagtattgatcatggagatccaggatcagagaagagctttggcatgaaacaaaggcctgatggtgatatcgagattgacgaaaagttttgggaagagggttttcatataccagtatgtgagaagtgcaaaggagtcctaaagcctgatgtaattttctttggagacaacatcccgaaggaaagagctactcaagcaatggaagttgcaaaacagagcgatgcattcctcgtgttgggttcatccttaatgacaatgtctgcttttcgcctttgcagagcggctcatgaggctggtgctatgaccgcaattgtaaatataggcgaaacaagagctgatgacattgttccattgaaaatcaatgctagggttggtgagatattgcacagagttcttgacgtgggatcgctcagtgtcccagctctctagcacaatgtccggatcatttaagtaaactttggcaagagctatgttatcatttagatcacctatatatattatttataactaatcaaaatgaatgcttgtattcctgcaacgtatctcaagttgtaaatccaacatcaaataaaagagtaatcaacatcaaataatagattcaacac

SEQ ID NO: 201 - protein, 373 aa, Arabidopsis thaliana
MNMRRVFGGVSTDLFPSRSMYRPLQSGGNLVMLFKGCRRFVRTTCRVSIPGGSLGNESKAPPRFLRDRKIVPDADPPNMEDIHKLYRLFEQSSRLTILTGAGVSTECGIPDYRSPNGAYSSGFKPITHQEFTRSSRARRRYWARSYAGWRRFTAAQPGPAHTALASLEKAGRINFMITQNVDRLHHRAGSDPLELHGTVYTVMCLECGFSFPRDLFQDQLKAINPKWAEAIESIDHGDPGSEKSFGMKQRPDGDIEIDEKFWEEGFHIPVCEKCKGVLKPDVIFFGDNIPKERATQAMEVAKQSDAFLVLGSSLMTMSAFRLCRAAHEAGAMTAIVNIGETRADDIVPLKINARVGEILHRVLDVGSLSVPAL

SEQ ID NO: 202 - DNA, 1511 bp, Arabidopsis thaliana
cttgggtattaatttcaatctgttagcttctcggtgaaaaactcgattggtggctttattttgatctcagtagtacgatactttctagctagatcttcttcattgaatgtaattggcttatcatagattcatttctccattacttttttttgctagtgaaattgtgatcatagattcatctctgcgatttattaggctttctatgaacatgagaagagtgtttggaggtgtatctacagatttgtttccgtcgcgaagtatgtaccggccgctgcagtctgggggaaacttggttatgttgtttaaaggatgcagacggtttgtgagaacaacgtgtcgcgtttcgatccctggtggttctttggggaatgaatcaaaagcacctccaaggtttctgagggatagaaagattgttccagatgctgatccccccaatatggaagatatccacaagttgtatcgactttttgagcaaagctcgagactcaccatcttgactggagctggggttagcacagaatgtggaattccggattacagaagtcccaatggagcatacagttctggtttcaaaccaattacccatcaggtgatctgaaggagtttactcgatcaagccgagctcgtaggcggtattgggcgaggagttacgctggatggaggaggttcactgcagcacaaccaggaccagctcatactgctttagcatcactagaaaaagctggacgaataaattttatgatcacacaaaatgttgacaggttgcatcatcgtgctgggagcgatccacttgaattacatggcacagtatatactgttatgtgcttagagtgcggcttctcttttccccgagacttgtttcaggatcagctaaaagcaatcaatcctaagtgggctgaagctatagaaagtattgatcatggagatccaggatcagagaagagctttggcatgaaacaaaggcctgatggtgatatcgagattgacgaaaagttttgggaagagggttttcatataccagtatgtgagaagtgcaaaggagtcctaaagcctgatgtaattttctttggagacaacatcccgaaggaaagagctactcaagcaatggaagttgcaaaacagagcgatgcattcctcgtgttgggttcatccttaatgacaatgtctgcttttcgcctttgcagagcggctcatgaggctggtgctatgaccgcaattgtaaatataggcgaaacaagagctgatgacattgttccattgaaaatcaatgctagggttggtgagatattgcacagagttcttgacgtgggatcgctcagtgtcccagctctctagcacaatgtccggatcatttaagtaaactttggcaagagctatgttatcatttagatcacctatatatattatttataactaatcaaaatgaatgcttgtattcctgcaacgtatctcaagttgtaaatccaacatcaaataaaagagtaatcaacatcaaataatagattcaacac

SEQ ID NO: 203 - protein, 271 aa, Arabidopsis thaliana
MWNSGLQKSQWSIQFWFQTNYPSGDLKEFTRSSRARRRYWARSYAGWRRFTAAQPGPAHTALASLEKAGRINFMITQNVDRLHHRAGSDPLELHGTVYTVMCLECGFSFPRDLFQDQLKAINPKWAEAIESIDHGDPGSEKSFGMKQRPDGDIEIDEKFWEEGFHIPVCEKCKGVLKPDVIFFGDNIPKERATQAMEVAKQSDAFLVLGSSLMTMSAFRLCRAAHEAGAMTAIVNIGETRADDIVPLKINARVGEILHRVLDVGSLSVPAL

SEQ ID NO: 204 - DNA, 1729 bp, Arabidopsis thaliana
atacatcgagaggcagagaaggtgttcttcttcttgtccaaaagagaagacaaaacctaaatgtctttaggttacgcagagaaattatccttcattgaagatgttggtcaagtcggcatggctgaattcttcgacccatctcatcttctacaatgcaagattgaagaacttgctaagttgattcaaaagagtaagcatctagtagtctttactggtgcaggcatttcaacttcttgtggtattcctgatttccgaggccccaaaggaatttggacgttacagcgcgagggcaaagatttacctaaagcatctctgccatttcaccgtgcaatgccgagtatgacccatatggctttggttgaattagaaagagctggcattttaaaatttgttatcagtcagaatgtggatggcttacatcttcgatctggaataccaagagagaagctttctgaactgcatggagactcttttatggagatgtgcccatcatgtggagcagagtacctgcgtgatttcgaggtggaaactattggattaaaggagacatcaagaaagtgttctgttgaaaagtgtggagctaaacttaaagatacggtcttggattgggaggatgctttgcctccaaaagaaattgatcctgcggagaagcactgcaaaaaggctgatcttgtactctgtttgggtaccagtttgcagataacccctgcttgcaatttgcctctcaagtgtctcaaaggtggaggcaagatcgtcatagttaatcttcagaaaacaccgaaagacaagaaagcaaatgtagtgattcatggtcttgttgataaggtggttgcaggggtcatggaatcgctcaacatgaagattcctccatatgtcagaattgatcttttccagataatcctaactcaatctataagcggagatcagaggtttattaattggaccctgcgtgttgcgagtgttcatggattgacttctcagttaccattcatcaagtctattgaggtttctttctcagataaccataattacaaagacgcagttctcgataagcagccttttcttatgaaaaggagaacagcacgaaacgaaacttttgatatattctttaaagttaactacagtgacggttgtgactgtgtctccactcaacttagcctcccatttgaattcaagatttcaacagaagagcatgtagagattattgacaaggaggctgtgctacaaagcctgagagagaaagcggtagaagaatccagttgcgggcaaagcggtgtggttgagagaagagtggtttctgaaccgagaagtgaggctgttgtgtatgctacggtgactagtctcaggacttaccatagtcaacaatctctgcttgctaatggagacctgaaatggaagctggaaggttctggaacatcccgtaaacgctctagaaccgggaagcgaaaatcgaaggctctggcagaagaaaccaaggcataggaagaagaaaagaaagcttttggtgtatataaagaaacactagtctaaccggaataggtaatatggaagttattggcgttttgagagctgagtgaattttgtttttggtccacattcggttctcttgaaacaaaagttaaccaggaattgaaagagataatcttggttcgttgtcgtttagtatcggttgatttttgtagaagctagtgcattcgaaatattattaaaaaaaatttacaagatgatc

SEQ ID NO: 205 - protein, 473 aa, Arabidopsis thaliana
MSLGYAEKLSFIEDVGQVGMAEFFDPSHLLQCKIEELAKLIQKSKHLVVFTGAGISTSCGIPDFRGPKGIWTLQREGKDLPKASLPFHRAMPSMTHMALVELERAGILKFVISQNVDGLHLRSGIPREKLSELHGDSFMEMCPSCGAEYLRDFEVETIGLKETSRKCSVEKCGAKLKDTVLDWEDALPPKEIDPAEKHCKKADLVLCLGTSLQITPACNLPLKCLKGGGKIVIVNLQKTPKDKKANVVIHGLVDKVVAGVMESLNMKIPPYVRIDLFQIILTQSISGDQRFINWTLRVASVHGLTSQLPFIKSIEVSFSDNHNYKDAVLDKQPFLMKRRTARNETFDIFFKVNYSDGCDCVSTQLSLPFEFKISTEEHVEIIDKEAVLQSLREKAVEESSCGQSGVVERRVVSEPRSEAVVYATVTSLRTYHSQQSLLANGDLKWKLEGSGTSRKRSRTGKRKSKALAEETKA

SEQ ID NO: 206 - DNA, 1719 bp, Glycine max
atgactgagagaggttactatgttcaagaacaaaacacacttcttctcaatttcttctttcttctgagagagaaagaaagtgagggacttggagagaatttctgtcatcacagcacattgagtcaccaatcaaccatgtctctggggtatgccgagaagctttcctacatagaagatgtgggcaacgttggaatggtcgaatatttcgacccatcccatgttttgcgagagaaaatgagattcagtaacaattctgttcctttaaatactgccattgttaatatttttgcagctacctctcttgctggatccatctccaaggattgcctcaaatcttccatagagcaattcagcatcttgaagtctttttcagtcaacattcaccctccccatcaacatatcatcaagcaggtgctgtggtctcctcctgctatagatcaacttgctatcatgataaaaaagagtaagcatctagtggtgtttactggtgcaggaatatcaacttcttgtggtatacctgattttcgaggtcccaagggaatttggacacttcagcgtgaaggtaaagccctgcctgaagcatcactgccatttcatcgtgcagcgccaagcatgacacacatggctctggttgaattagaaaaggctggcattttgaagttcgtcatcagtcagaatgttgatggtctccatcttcgatctggaataccaagggagaaacttgctgaattgcacgggaattccttcatggagacatgcccttcttgtggagaagagtactttcgtgattttgaggtagaaactattggtttaaaggagacttcaaggcgttgttcagttgccaaatgtgggactagacttaaggatacagtccttgactgggaggatgcattgcctacaaaggagatgaatcctgctgagaagcattgcaaacaggcagatatagtgttatgcctgggtacaagtttacaaataactccagcatgcaacttgcctctgaaagcacttcgtggtgggggtaaagttgttattgtaaatctccaggtaattgcgggtgtcatggaccagcttaatatgcagatttctccatttgtcaggattgatcttttccagattattctagtgcaagctttgagtaacgataaaagatatgtgaactggactctccaggttgcaagtgctcatggacaaaaagcagcattgcctttcatcaagtctgttgagatctccttcttggacagggaagattataaagcagccattctggataagcaaccatttcggcttaaaaggagaacagcatataacaaagcatttgaaatggttctgaaactcaactttagcgatggctgtggttgctcatcccttgaaattgatgtccctgttgattttaaggtttcaactgactgctttgactttgataaggactacatattccaaaagctgagagacaaggcagttcttgaatcaagatgtggtcagaatgctgttattgagagaaagaccatcttgacacctagaagtgatgtcactacctatgccattgtgaccaatgttgttcagtacagcaaagcatgtaaagcagcccttgattctcttagtaatggtgattttaaaaaaagaaaagctagtgtgactggtactggatcatctaggaagcgttcaaaggggtcctccaagtgtaaatctagatcagacaatattaggggtcatacgtag

SEQ ID NO: 207 - protein, 572 aa, Glycine max
MTERGYYVQEQNTLLLNFFFLLREKESEGLGENFCHHSTLSHQSTMSLGYAEKLSYIEDVGNVGMVEYFDPSHVLREKMRFSNNSVPLNTAIVNIFAATSLAGSISKDCLKSSIEQFSILKSFSVNIHPPHQHIIKQVLWSPPAIDQLAIMIKKSKHLVVFTGAGISTSCGIPDFRGPKGIWTLQREGKALPEASLPFHRAAPSMTHMALVELEKAGILKFVISQNVDGLHLRSGIPREKLAELHGNSFMETCPSCGEEYFRDFEVETIGLKETSRRCSVAKCGTRLKDTVLDWEDALPTKEMNPAEKHCKQADIVLCLGTSLQITPACNLPLKALRGGGKVVIVNLQVIAGVMDQLNMQISPFVRIDLFQIILVQALSNDKRYVNWTLQVASAHGQKAALPFIKSVEISFLDREDYKAAILDKQPFRLKRRTAYNKAFEMVLKLNFSDGCGCSSLEIDVPVDFKVSTDCFDFDKDYIFQKLRDKAVLESRCGQNAVIERKTILTPRSDVTTYAIVTNVVQYSKACKAALDSLSNGDFKKRKASVTGTGSSRKRSKGSSKCKSRSDNIRGHT

SEQ ID NO: 208 - DNA, 1182 bp, Glycine max
atggctatgtctttacctcttcgtttctattcctcctcgtctttctctctcacttctcttggggttgtgagaaaagtgctcgggactcttacaacagatattgttcaaccaaggagtggaaattggcacttagcaaaaagaggtggaagactcatatcgtttaagggtcgtgcgaggctggtacatacaacgtgccgaatctctgtccctgggaccttaccaagaactgatgaaaaggcctcatctaacatctcgagggataagaagacagttccagaagcagatcctccgagtatcaaagacgttcagcttttgtatgaatttttggaccggagtaccaagctcacggtattgactggagctggaatcagtacagagtgtggcatccccgactacagaagccccaatggagcttatagttctggtttcaaaccaataacccatcaggagtttctccgttcaagtcgagctcggaggagatattgggcaaggagctatgctggatggaggcgatttacaacagcacaaccatctgctgcccatactgcattggccacattagataaagctggccgaatcaattttatgattacccaaaatgttgataggctgcatcatcgtgctggtagcaacccattagaaatacatgggactgtatacactgtaatttgtatagattgtggatattccttttgccggagcttatttcaggaccagttgaagacccttaatcccaagtgggcagaagcaatcgataacttggaccatggaaaccctggatcagataagagttttggcatgaaacaaagacctgatggtgatattgagattgatgaaagattttgggaggaggattttaccatcccaacttgtcataagtgcaatggagctctcaaacctgatgttgtcttttttggtgataatgttcccaaggacagagctgatatggcaatggaagcatctagaagatgtgatgcttttcttgtactcgggtcatctctgatgaccatgtctgcttttcgacttatcagagcagctcatgaggctggtgctgctactgcaattgtgaacataggtgtgacgcgtgctgatgattttgtgcccctgaaaataaatgcacgattgggtgagatcctgccaagagtacttgatattggatctataagcatacccgctgtataa

SEQ ID NO: 209 - protein, 393 aa, Glycine max
MAMSLPLRFYSSSSFSLTSLGVVRKVLGTLTTDIVQPRSGNWHLAKRGGRLISFKGRARLVHTTCRISVPGTLPRTDEKASSNISRDKKTVPEADPPSIKDVQLLYEFLDRSTKLTVLTGAGISTECGIPDYRSPNGAYSSGFKPITHQEFLRSSRARRRYWARSYAGWRRFTTAQPSAAHTALATLDKAGRINFMITQNVDRLHHRAGSNPLEIHGTVYTVICIDCGYSFCRSLFQDQLKTLNPKWAEAIDNLDHGNPGSDKSFGMKQRPDGDIEIDERFWEEDFTIPTCHKCNGALKPDVVFFGDNVPKDRADMAMEASRRCDAFLVLGSSLMTMSAFRLIRAAHEAGAATAIVNIGVTRADDFVPLKINARLGEILPRVLDIGSISIPAV

SEQ ID NO: 210 - DNA, 1137 bp, Medicago truncatula
atgtctccctcttcttctttcacctcccttgtatttgctaggaaagtgctagggactattataacaggcattccaacaactcaaagctggaacttatcaacaaaaggaggacaactcgtagcgtttaagggcggtgcaaggttcatccaaacatcttgtcgaatctctgcacctggaacattcccagtaaatgatggaaaaccacagttgagggataagaaggtagttcctgatgcagatcctcctagtaccaaagatgtcaaccttttgtatcaattttttgaaaaaagtaccaagctcgtggtattgactggagctggaatcagtacagaatgtggcatccctgactatagaagccctaatggtgcttatagttctggtttcagaccaataacccaccaggagtttcttcgttcaacccgagccaggaggagatattgggctaggagctatgctgggtggaggcaatttactgcagcacagccatctgctgctcattgtgctttggcagctttcgagaatgccggccgagttgattttatggttacccaaaatgttgataggctgcatcatcgagctggtagcaacccattagaattacatgggactgtatataatgtaatttgtataaattgtggatattccctttgccgaagcttatttcaggaccagttgaagtcccttaatccaaagtgggcagaagcaattgaaaatttggaccatggaaatgctgggtcagacaaaagctttggaatgaaacaaagacctgatggtgatattgagattgacgaaaaattttgggaggaggattttgccattccaacctgccagaagtgcaacggcgttctcaaacctgatgttgtcttcttcggtgataatgttcctaaggaaagagccgatatggcaatggaagcatctagaagttgtgatgcttttcttgtactagggtcgtctgtgatgaccatgtctgcttttcgacttgtcagggcagctcatgaggctggtgcagctactgcaattgtcaatgtaggtgtgacacgtgctgatgattttgtgcccttgaaaatcaatgcacgattgggtgagatattgccaagagtacttgacatgggatccatcagcgtaccttctgtgtaa

SEQ ID NO: 211 - protein, 378 aa, Medicago truncatula
MSPSSSFTSLVFARKVLGTIITGIPTTQSWNLSTKGGQLVAFKGGARFIQTSCRISAPGTFPVNDGKPQLRDKKVVPDADPPSTKDVNLLYQFFEKSTKLVVLTGAGISTECGIPDYRSPNGAYSSGFRPITHQEFLRSTRARRRYWARSYAGWRQFTAAQPSAAHCALAAFENAGRVDFMVTQNVDRLHHRAGSNPLELHGTVYNVICINCGYSLCRSLFQDQLKSLNPKWAEAIENLDHGNAGSDKSFGMKQRPDGDIEIDEKFWEEDFAIPTCQKCNGVLKPDVVFFGDNVPKERADMAMEASRSCDAFLVLGSSVMTMSAFRLVRAAHEAGAATAIVNVGVTRADDFVPLKINARLGEILPRVLDMGSISVPSV

SEQ ID NO: 212 - DNA, 1452 bp, Oryza sativa
atgtcacttggctatgccgagaagctatcctaccgagaggatgtgggaaatgtcggcatgcctgagatcttcgactctcctgaactcctccacaagaagatagaagagcttgcagtcatggtgcgagagagtaagcatttggtggtgtttactggagcaggcatatcaacttcatcaggcatacctgacttccgagggcccaaaggcgtgtggacactgcagcgttcaggaaaaggtgttcctggtgcatcactgccgtttcaccgagctgttccaaccttgactcatatggcactggttgaattggaaaaaacaggacgattaaagtttgtcataagccagaatgttgatagcttacatctccgctctggcctcccaagggagaagctggctgaattgcatggaaattctttcaaggagatctgcccaagctgtaaaaaggagtaccttcgtgattttgaaattgagacgataggactgaaggatactccaaggcgttgttctgataagaactgtggagctagattaaaagacacagttcttgattgggaggatgctttaccccctgaggagatggatgctgccaaggagcagtgtcaaaaagctgatcttgtcctatgtttaggaactagtctgcagattactcctgcttgtaatatgcctctgttgtcactgaagaatggggggagggtggctattgtaaatcttcaggcaactccgaaggataaaaaggcaagccttgtcattcatggacttgtggataaggtcattgctggggttatgtatatgatgaatctgcgtatccctccatatattcgtactgactttgttcaaattagtctccggaactcggtcaaaaaaaaatgcgtgagatggactctccgagtaacaagcattcatggcttgcgagcacctttgccatttcttcgatcagttgaggtttcctttcctgaaagacctgacatgaagcctgtagtactaaaggagcaaccattttctttgcagagagaaacatcaatgaatagaccgtttgtcatgctattgacattcaactttagtgatggttgcggctgttcgagctcttccattgaatggcctgttgattttctgaagcaaaaagacagctttgtcagggatagaagtctagtcctgcaagagttgcaacatgctgcagagcatcgatcacgtgcagggcagcatgcaattctggagagggagggtgtgccaagagctgaaacgtcaattcatgcacttgtgaccaacatcgtcaggtatgatactgaagatagcaaggcggcagttcccatggctacatggatgaacagcaacggcagcctttcgaaacggcatatggatgccattggttgcaacccagcatcgtcaaaaaagcagaagttggttgctactcgtcatcggcgaaagggcttgaaccctgctactcagaaagtttga

SEQ ID NO: 213 - protein, 483 aa, Oryza sativa
MSLGYAEKLSYREDVGNVGMPEIFDSPELLHKKIEELAVMVRESKHLVVFTGAGISTSSGIPDFRGPKGVWTLQRSGKGVPGASLPFHRAVPTLTHMALVELEKTGRLKFVISQNVDSLHLRSGLPREKLAELHGNSFKEICPSCKKEYLRDFEIETIGLKDTPRRCSDKNCGARLKDTVLDWEDALPPEEMDAAKEQCQKADLVLCLGTSLQITPACNMPLLSLKNGGRVAIVNLQATPKDKKASLVIHGLVDKVIAGVMYMMNLRIPPYIRTDFVQISLRNSVKKKCVRWTLRVTSIHGLRAPLPFLRSVEVSFPERPDMKPVVLKEQPFSLQRETSMNRPFVMLLTFNFSDGCGCSSSSIEWPVDFLKQKDSFVRDRSLVLQELQHAAEHRSRAGQHAILEREGVPRAETSIHALVTNIVRYDTEDSKAAVPMATWMNSNGSLSKRHMDAIGCNPASSKKQKLVATRHRRKGLNPATQKV

SEQ ID NO: 214 - DNA, 1182 bp, Oryza sativa
atggcggcgggggcgcacgcgtcgcgcgcttcggctccgatcattgcaggtctcacaggtgctcttcgagcagcatataaaggattttctcctcagttatgcaacttccatgcgtcagtaaataatggacttctccacagaaggaaaatacaactccattttatatgctcttttcgctccatacaagcaagatataaccattcgtcagctgttgcacctaaggactattgcgaaacttacatccagtttctaagagataaacagatagttcctgattcagatcctccaagtgctaaggatgtggacctactttaccggtttattgatcagagtaaaaaactcatggtgttaactggagcaggaatgagcactgaatcaggaattcctgattataggagccctaatggtgcttacagttctggttttaaaccacttactcatcaggagtttgttcgttctattcgagcccgaaggcggtactgggctaggagctatgctggatggagaaggttcaggagagcacaaccaaactcagcccattatgctcttgcatcactggagagaattggccgggtacactcaatggttactcaaaacgtggataggttgcatcatcgtgctgggagtaagccagttgaattgcatggaagtgtgtatgaggtagcatgtttagactgtggtacatccattgaccgagaatcattccaggagcaggtcaaggacctcaacccaaagtgggctctagctattgacagtttggaagtaggacaaccgggctcagacaaaagtttcggaatgcagcagcgacctgatggtgatattgagattgatgagaagttctgggagcaagattttgatattcctagttgcaaccaatgtggtggagtgctgaaacctgatgttgtgatgtttggtgataatgttcctgaagagagagctgaaagcactaaggaggctgcaagaaattgtgatgctcttctagtggttggttcagcactaatgacaatgtctgcttttaggctcgcaaggcttgcacatgaagcgaatgctccaattgcggcgatcaccattggtgagaccagggctgatagtattttatccttgaaaattaatgcaagatgtggggagatactgcccagaatacttcagatgggaagtctagctgtaccaaacgtaagttaa

SEQ ID NO: 215 - protein, 393 aa, Oryza sativa
MAAGAHASRASAPIIAGLTGALRAAYKGFSPQLCNFHASVNNGLLHRRKIQLHFICSFRSIQARYNHSSAVAPKDYCETYIQFLRDKQIVPDSDPPSAKDVDLLYRFIDQSKKLMVLTGAGMSTESGIPDYRSPNGAYSSGFKPLTHQEFVRSIRARRRYWARSYAGWRRFRRAQPNSAHYALASLERIGRVHSMVTQNVDRLHHRAGSKPVELHGSVYEVACLDCGTSIDRESFQEQVKDLNPKWALAIDSLEVGQPGSDKSFGMQQRPDGDIEIDEKFWEQDFDIPSCNQCGGVLKPDVVMFGDNVPEERAESTKEAARNCDALLVVGSALMTMSAFRLARLAHEANAPIAAITIGETRADSILSLKINARCGEILPRILQMGSLAVPNVS

SEQ ID NO: 216 - DNA, 1083 bp, Physcomitrella patens
atgtggaagcctaaccattccattagatgtctccaacttcaaacaggtgccagaaataaattgtcgccctgtctgctaaacagcactaggttctgcaactacgctactctggctgcaacaggttctgtcgctgttcctcaagaaatatcttcttcactaaattccatcgttcccgactctcctccaccttctcaatccgatctgcaacgcttgtatgattttgtgaacgacagcaaaagattagttgttataactggggctggcacaagcacagagtgtggtattcctgactatcgaagtccacatggagcttacagtagcgggttcaagccgatgactcaccaggatttcataagttcagaacaaaaccgcagacggtattgggctcgtagttatgctggatggaggcgtttcattagtgcgaaccctggacccacatacctctccctcgctcagctagaggcgaaagggcgtgtgaaaggcatgataacgcagaacgttgacaggttacattataaagctggcagcaaaccgattgagcttcatggaactactcatgaagtaatctgtttagattgtggcgatatgtctgaccgctatctctttcaaaacagagtgaagaagttgaatcctgagtgggcgaaggctgtagaagctttggaatcaggccaaccaggatcagatgctagctttggcatgcggatccgtcctgacggtgacttggacattcatgaaaagttctttcggaaggggaacttcatcattcccgagtgcaagaaatgcaatggcactctcaaacccaatgttgtgttttttggtgacaatgttccaaagccacgagtagatctttgcatgtcgctagcacgctcagctgatgcgttgctggtggtgggttcgtctgtgatgactatgtcagccttgcgtctggtcagggctgctgctgacatgggctcaccaattgcgattttgaatatcggtcctacacgggctgatgacttggctcacttcaaaataaatgctcgctctggagaggtattgccccggctcctgaacatgggttccatgagtgtgcctacttcgtaa

SEQ ID NO: 217 - protein, 360 aa, Physcomitrella patens
MWKPNHSIRCLQLQTGARNKLSPCLLNSTRFCNYATLAATGSVAVPQEISSSLNSIVPDSPPPSQSDLQRLYDFVNDSKRLVVITGAGTSTECGIPDYRSPHGAYSSGFKPMTHQDFISSEQNRRRYWARSYAGWRRFISANPGPTYLSLAQLEAKGRVKGMITQNVDRLHYKAGSKPIELHGTTHEVICLDCGDMSDRYLFQNRVKKLNPEWAKAVEALESGQPGSDASFGMRIRPDGDLDIHEKFFRKGNFIIPECKKCNGTLKPNVVFFGDNVPKPRVDLCMSLARSADALLVVGSSVMTMSALRLVRAAADMGSPIAILNIGPTRADDLAHFKINARSGEVLPRLLNMGSMSVPTS

SEQ ID NO: 218 - DNA, 1155 bp, Physcomitrella patens
atgtcttcgcttggatatgccgagaagttgtcgtatagggctgatgttggtacagtgggaatgccagagctctatgacccagccgaagatcttcaatccaagatcgataagctggcccaacttatatcggagagtcgtcatttggtagcgttcactggagccggcatttcgacctcctgtggaatccccgatttccggggccctaaaggcatctggactttgcagcatgaaggaaagcccatgccgaaaattgagatgcccttcgatcaggctcgaccaggcgttactcatatggctctttttgagcttcagcaagctggaatactcaagttcattattagccagcagaatatagatgggttacatttacgatctggaattccgaggtcgcaattggctgagcttcacggcaactgctttcgcgaaatatgttcttcctgcgacaaagagtattttcgagacttcgaggtggaaactctaggatgtaaaccaactgggcgccgctgtacggaacacgattgtggagggaaactcgttgatacaattgtagactgggaggatgcgctgcctcctgctgaattgagggcggcagaaaagcatacaaagaaggctgacttggtgttgtgtcttggcacaagcttgcagatcacccctgcgtgtaatcttcctttgaaaactgtgcgagcaggtggtaaaatggttattgtcaatctgcaggcaactccaaaagacaagagtgcagctttgctggtccgaggacgggttgatgaggtaatatcaggaataatgagccgcctgcatcggaccattccaccatacgttcatattgaccgcattctacttagctactactattactggacaaagaagaagagtgtgaaatggtactttcggatttcaagcattcatgggcaaaaaatggctttaccttttatcaaatcaattgaggtaatgtttccaaacaggccagagttcaagccagccgcgttcgccaaacctccatgcctcgttcgcagggagaccatgcggctgaaagaactggatgttgcattgaaattgcactttgcggagggctgtatgtgttccagtggcgacatttttcaaacgttgtcgtttgaggtacgtgacaactatttgttatgtcgaattgattag

SEQ ID NO: 219 - protein, 384 aa, Physcomitrella patens
MSSLGYAEKLSYRADVGTVGMPELYDPAEDLQSKIDKLAQLISESRHLVAFTGAGISTSCGIPDFRGPKGIWTLQHEGKPMPKIEMPFDQARPGVTHMALFELQQAGILKFIISQQNIDGLHLRSGIPRSQLAELHGNCFREICSSCDKEYFRDFEVETLGCKPTGRRCTEHDCGGKLVDTIVDWEDALPPAELRAAEKHTKKADLVLCLGTSLQITPACNLPLKTVRAGGKMVIVNLQATPKDKSAALLVRGRVDEVISGIMSRLHRTIPPYVHIDRILLSYYYYWTKKKSVKWYFRISSIHGQKMALPFIKSIEVMFPNRPEFKPAAFAKPPCLVRRETMRLKELDVALKLHFAEGCMCSSGDIFQTLSFEVRDNYLLCRID

SEQ ID NO: 220 - DNA, 1007 bp, Physcomitrella patens
gatttgaaggtgcaagcctgttttgttgcgtatctatgcctcgtgctggtgtcgcagcctcggcgtttaagcttcgtaacatttggcacattcacaaccttcacagggtccgatcacaacagacaagactcatgagtgactcagtagaggagttcagttcggtctttcaacatgccaagaaagttgttgtgttgacaggagcaggaatatcagcggaatcaggcattccaactttccgtggagaaggtggcctgtggcgcgacttcgatgctacagaacttgctaccccgggtgctttcgcagcaaatccctccctagtatgggagttttatcattatcgtagaactatcgttgctggagcttcacctaatgcaggccactacgctgtagctgcattgcagaggagatgcagacgcctagggaaagacttcattctcctcactcagaacattgatgggctccatgccaaagctggtagcaccgatgtggttgagcttcacggctccttgtgggagactcgctgttgtcattgcaaggcagtggaagcgaataggaacatgcccatatgtccagctctcgatggcaagggagcaccagacactgttcatgaagccaatatcccatcaatgcaattgcctcgttgtaataagtgcaatggcttactgcggcctcgtgttatttggtttggagagtgtctagagcgggatgttttgaggcgtaccgatgatgcgctgcaaggatgcgacttgctcttggtagttgggacttcggctgtggtctaccttttctggagaaatatgatggaagtggaactgcacacggatttcgtggaatctctgctccaggatgataggcttagatcgagaattggcttagcactccgagaaaaatctcaataccttcttgttgccttccgcaggttcaaatttcagggaccctcgtcagtgaagttgcctacggctcttggcattggagaagatgagctagctgaaatgaaggagacttaa

SEQ ID NO: 221 - protein, 323 aa, Physcomitrella patens
MPRAGVAASAFKLRNIWHIHNLHRVRSQQTRLMSDSVEEFSSVFQHAKKVVVLTGAGISAESGIPTFRGEGGLWRDFDATELATPGAFAANPSLVWEFYHYRRTIVAGASPNAGHYAVAALQRRCRRLGKDFILLTQNIDGLHAKAGSTDVVELHGSLWETRCCHCKAVEANRNMPICPALDGKGAPDTVHEANIPSMQLPRCNKCNGLLRPRVIWFGECLERDVLRRTDDALQGCDLLLVVGTSAVVYLFWRNMMEVELHTDFVESLLQDDRLRSRIGLALREKSQYLLVAFRRFKFQGPSSVKLPTALGIGEDELAEMKET

SEQ ID NO: 222 - DNA, 1585 bp, Physcomitrella patens
atgtggaaacaatggattcaaacaacacgatcacaaatgaggactcatggattgcaaaaaagcacaagagtccttttcgacggccacaaggttttattgttcaaggatgagctgcggcgacatgaaggcatccatgaaaagcttatcgattcagcatgtgggttcctctttgattccgccgtgtgcttcgattacgtcttgcattgggcgcttgtggcacggcagggcagagtgggtttggctctggatggattggaggctgcaggaggagctcaggaatgtggatgtcaaggtgcggaaattccttgcgggaggttggcgaagtgttgggtagcattgacagagaggggtagagaagcgcaagagatggaggacgaagaggaaggtcctgtgctgcgagccaaagtgaagcaccttgctcagctcgtgcgagagtccaagtatgccgtggtgtacacaggagcaggcatttctacagcagcaggtattccggattttcgtggcccatccggtgtctggacccttcaagccaagggtaaagtagttgccgaaccagacttcaccaagctaaatccaacgttgacccactatgttttgagaagtttcatagagagaggccacttccattatattgttacacaaaatattgacagtttgcatctccgaagtggtgtaccatcagaaaagcaaagtgagcttcatgggaattactctttggaaacctgtccactttgtgatgcccgttactttagatcacatgcagtgtggaaagggttgacaactcccaccaaaaatccttcaacagctcgtaaggacttgaggcaaggctcgacacagggtgatgataagccacagaggtccaacaagaggcaagtgcgcaatatcgatcatagaaccgggcgtttatgtgaagccgacggctgcgcaggagagctagagagctcggtggttctctttggagaaagcttgccggcgaaagaagtgaactcagcttgggaccatacatacaaggctgatcttgcgcttgttctggggtccagtttgaaagtaggacctgcttgtgacatgcctgcacaagtgggcaagaacggcggaaaacttgttattgttaatttacagcatacgccgtttgatggacgagcttctctggtgattcatgcgcgttgtgacgatgtcttacgattacttgctgaggaactagacctttcagaacagaacccatcacttgtctcctcaaaccgggctctggaacatgacgtaggtgtgcatgaagacatgtcttctgaatgttatgaccagaaactcgaagaatttgaacggagttttatggtgcaaacgacaagttttgctcctcgcacttagcgtcctcactttctactatttataacttagttttataccacagcttaaacttacattggtagtgtagagtactgtgccgaccattgtgaaacacatcacttatttcaggatgtttcacatgtaaattacatgttgcgagaacaaatggttagtgttctgaagaattgatttacttaggaattttttcaatgtatcactattatgttcagtgcttcacaatcaa

SEQ ID NO: 223 - protein, 453 aa, Physcomitrella patens
MWKQWIQTTRSQMRTHGLQKSTRVLFDGHKVLLFKDELRRHEGIHEKLIDSACGFLFDSAVCFDYVLHWALVARQGRVGLALDGLEAAGGAQECGCQGAEIPCGRLAKCWVALTERGREAQEMEDEEEGPVLRAKVKHLAQLVRESKYAVVYTGAGISTAAGIPDFRGPSGVWTLQAKGKVVAEPDFTKLNPTLTHYVLRSFIERGHFHYIVTQNIDSLHLRSGVPSEKQSELHGNYSLETCPLCDARYFRSHAVWKGLTTPTKNPSTARKDLRQGSTQGDDKPQRSNKRQVRNIDHRTGRLCEADGCAGELESSVVLFGESLPAKEVNSAWDHTYKADLALVLGSSLKVGPACDMPAQVGKNGGKLVIVNLQHTPFDGRASLVIHARCDDVLRLLAEELDLSEQNPSLVSSNRALEHDVGVHEDMSSECYDQKLEEFERSFMVQTTSFAPRT

SEQ ID NO: 224 - DNA, 690 bp, Physcomitrella patens
atgacgatagacccagatgagctggcgacagcggtggctttcactggagcccgaatatcagtagaatcaggtataccagactttcgtagtcgaggaggtctttggagcaagtttgataattttcaagcaaggccagaactcttctgggagatgtcaagggagatgccagccactgtagataaggcgcagccaaaccaacacatgtcacccttgcagagatggaaaaagaaaaccttctatcctcaagcaggaagtcaaaaagtgttcgagttccatggcaatgccgccatatcaatatgcatgatgtgtcatgaacaaattcccactcttgaagcaatcggacaactccaaggccaagattcaaaagtgccaaagtgcaagatttgtgatggagaaatgaaaatggatgttgttctgtttggggaagagattgcagattcaatagtagaaggggccatggctgcagcaattattgctgatgtagtcttggttgttggcacatcgctgacggtgtcaccagccaacatagtcgtagaattttgtcgaaaaaggattggaagagtgattgttgtggatccggaccctaatgttagacgtcatgtggatctgctgctttgtggaaaagctggaagcgtgctgcctcaacttctacaagcttgtgtttctactcgcaacgtcgttactacttga

SEQ ID NO: 225 - protein, 229 aa, Physcomitrella patens
MTIDPDELATAVAFTGARISVESGIPDFRSRGGLWSKFDNFQARPELFWEMSREMPATVDKAQPNQHMSPLQRWKKKTFYPQAGSQKVFEFHGNAAISICMMCHEQIPTLEAIGQLQGQDSKVPKCKICDGEMKMDVVLFGEEIADSIVEGAMAAAIIADVVLVVGTSLTVSPANIVVEFCRKRIGRVIVVDPDPNVRRHVDLLLCGKAGSVLPQLLQACVSTRNVVTT

SEQ ID NO: 226 - DNA, 1395 bp, Populus trichocarpa
atgtctctgggttatgcagaaaagctttcttacattgaagatgtgggcaacgttggaatgtcagaattcttcgactcatctcatgttttgcaagaaaaaattgaaagacttgctgagatgatacaaaagagcaagcatctagttgtgtttacaggtgcaggaatatcaacatcttgtggcatacctgattttcgaggtcccaagggaatttggacgttacagcgcgagggaaaaccattacctgaagcatcgctaccatttcatcgagcaatgccaagcatgacacacatggctttggttgagctggagaaggctggcattttaaagtttattattagccagaatgtcgatggcctccatcttcggtctggaataccaagggagaaacttgctgaattacatgggaattccttcatggaagtttgcccttcatgtggtgttgagtattttcgggattttgaggttgaaactattgggttgaaggagacatcaagacgctgctctgatgtcaaatgtggagcaaagctaaaagatacagttcttgactgggaggatgcattgcccacaaaggagatgcttccagctgagaaacactgcaggatggctgatgttgtattatgtttggggacaagtttgcaaatcactcctgcatgcaatctgcctttaaaatgtctccgaggtgggggaaagattataattgtgaatcttcagaaaactccgaaggataagaaggcaagtttggtgatccatggatttgtagacaaggttattgcaggggtcatgaacttgctcaatttgaggattgctccatatgtcaggattgatcttcttcaagttatcataactcagtcattgagtttagatgaaagatatgtgaactggaacctccgggtggcaagtatacatgcactgaaagcaccgttgccattcatcgagtccattgaggtgtccttcacagatgctcaaaaatacaaagcggctgtgctacatgaccagccatttaacctaaaaaggaggactgcaccagcagaagcatttgaaatcctcttgaaactcaacttcagtgatggatgtggttgtccctccatccaaattaatgtccctgtcaattttaaggtttcaagtgactgctttaaccttgacaaggagtcggccatacaaaatctgaaggagagggcaattcaagatttgtgctgtggtcagaatgcactgatcgaaagaaaggtcattttagagccaaaaaccgaggttgcaaaccatgctttagtaaccaacattaaagctttcaattctgattcttggagtaatggtgatgtgaaacatccaagaggggttaatgggaccaaaacatctcggaagcgatcgtttggtcgcaagcgtaaatcgagattttag

SEQ ID NO: 227 - protein, 464 aa, Populus trichocarpa
MSLGYAEKLSYIEDVGNVGMSEFFDSSHVLQEKIERLAEMIQKSKHLVVFTGAGISTSCGIPDFRGPKGIWTLQREGKPLPEASLPFHRAMPSMTHMALVELEKAGILKFIISQNVDGLHLRSGIPREKLAELHGNSFMEVCPSCGVEYFRDFEVETIGLKETSRRCSDVKCGAKLKDTVLDWEDALPTKEMLPAEKHCRMADVVLCLGTSLQITPACNLPLKCLRGGGKIIIVNLQKTPKDKKASLVIHGFVDKVIAGVMNLLNLRIAPYVRIDLLQVIITQSLSLDERYVNWNLRVASIHALKAPLPFIESIEVSFTDAQKYKAAVLHDQPFNLKRRTAPAEAFEILLKLNFSDGCGCPSIQINVPVNFKVSSDCFNLDKESAIQNLKERAIQDLCCGQNALIERKVILEPKTEVANHALVTNIKAFNSDSWSNGDVKHPRGVNGTKTSRKRSFGRKRKSRF

SEQ ID NO: 228 - DNA, 47 bp, Artificial sequence
  primer: prm10399
ggggacaagtttgtacaaaaaagcaggcttaaacaatggcggcgggg

SEQ ID NO: 229 - DNA, 50 bp, Artificial sequence
  primer: prm10400
ggggaccactttgtacaagaaagctgggtgcaccagcttaacttacgttt

SEQ ID NO: 230 - DNA, 2194 bp, Oryza sativa; identical to SEQ ID NO: 43

SEQ ID NO: 231 - DNA, 1101 bp, Phaeodactylum tricornutum
tttgtacaaaaaagcaggcttaaacaatgcgccatacggatcgtctacacgccgtcacggctcggccacccgatccgaattctctactttccgcaacggaccaacaagagtgtattgatacgctgctcgcctggtttgccggtaaatcgcaaatactgtgtctgacgggagcgggtttgtctacggagtctggaattccagactatcggggtaacaatggaagctatcatcgtggacataaaccgatggtgcacgatcaatttatgaaatcggaatgtcaacgcaagcgatactggggtcgcggtatggtggggtggaaatctttcgatgagacggcgccaaatgccgggcacgtggcgctaaccgagttggaacgtctgggacgaatcggcgtcgctttcgaagacaatcgcgcgttttacgagggacacgacgatgacttggaatggacgtttcgttctggtcaccgaaaattatcactgattacccaaaacgtggataccctgcatcgccgagctggaaccaagcacttgattgagctccatggacgcaccgatcagctggaatgcatgcaatgtggtacaaaaagagaccgcaatagctttcataccgaattagaaggtcttaatacggattggctaaatagggcattggctacaacggacaatgacgatatgcgaccagatggagatgcagctgtagggatggaagatttcgagtccgtacaggttccgccctgtcagtcttgcggaggcttcatgaagcccagcgtggttttctttggtgacacagtaccaaggaatcgtgtcgcacaatgccaaaccgcagtggaaaaagcagatggattgctcgccgttggatcatctttggcggtccattcggcttttcgccatgtaagagcagcatcaaaattgggtgtaccgattgccattttaaatgtcggtggaacgcgtgcggaagccgagggtttggatgtcctgaaaatcgaggcaccagcagggcagaccttgggaggagtagcgaaggtattccaaccgtcgtctggcggacaaagacacgtaagcaccgactcgttatgaacccagctttcttgtacaaagt

SEQ ID NO: 232 - protein, 350 aa, Phaeodactylum tricornutum
MRHTDRLHAVTARPPDPNSLLSATDQQECIDTLLAWFAGKSQILCLTGAGLSTESGIPDYRGNNGSYHRGHKPMVHDQFMKSECQRKRYWGRGMVGWKSFDETAPNAGHVALTELERLGRIGVAFEDNRAFYEGHDDDLEWTFRSGHRKLSLITQNVDTLHRRAGTKHLIELHGRTDQLECMQCGTKRDRNSFHTELEGLNTDWLNRALATTDNDDMRPDGDAAVGMEDFESVQVPPCQSCGGFMKPSVVFFGDTVPRNRVAQCQTAVEKADGLLAVGSSLAVHSAFRHVRAASKLGVPIAILNVGGTRAEAEGLDVLKIEAPAGQTLGGVAKVFQPSSGGQRHVSTDSL

SEQ ID NO: 233 - DNA, 1270 bp, Solanum lycopersicum
atggtcatgtcaatgtccctgcgactttgttgcagaccttcaatttctggtttcaagaataaaagagatttgttgggcttagaattggcagcttatcaatcaagtaagacaatggggaaatggttaagtggagtgaagaagttcattccctttgagggatatgttaagtctgtgaaaacggcagcacgaatatcatttccaaagatctcagcagactgtcaagataaagagccttcaaattttttgagtcacaagaagatggttccttattcgaacccccctagcacggaagatgtggatagtttgtatgaattctttgatagaagtaccaagcttgttgtattgacgggagctggcatgagcacagagagtggaattccggattacagaagcccaaacggagcttatagtacgggtttcaaaccaattacccatcaggagtttctacgatcaatcaaggctcgaaggcgttattgggcaccgagctatgctggctggcgacgtttcactgctgctcaacctagtacaggtcatatagctctatcatctcttgagaaagcaggccatataagttttatgattacacagaatgtggacaggctgcatcaccgagctggaagcaatcctcttggattgcatgggactgtctacattgttgcctgtacaaattgtggtttttctctacctcgagatctatttcaagatcaagtgaaggctcataatcccaagtgggcagaagctattgaaaatttggactatgacagtcgatcagacaagagttttggaatgaaacaaaggcctgatggggatattgagattgatgagaagttctgggaagaggatttctacattcctgaatgtcagagctgccaaggagttctgaaacctgatgttgtcttctttggggataatgtccccaaatctagggcagatgctgctatggaagctgcaaagggatgtgatgccttccttgtacttggttcatctttgatgaccatgtccgccttccggcttatcaaagctgcacgtgaggcaggtgctgctactgcaattataaatattggtgctacacgagctgacgatattgtacctttgaaaattagtgctcgagttggagagatacttccaagattgctcaatgttggatcattaagtatccctgctccctagttcctgattcagagaactgttaattaatagcatcccagattctttttcatcagttgctgcaaatggattgtacacttggtcggaacgtgctagttcgccc

SEQ ID NO: 234 - protein, 389 aa, Solanum lycopersicum
MVMSMSLRLCCRPSISGFKNKRDLLGLELAAYQSSKTMGKWLSGVKKFIPFEGYVKSVKTAARISFPKISADCQDKEPSNFLSHKKMVPYSNPPSTEDVDSLYEFFDRSTKLVVLTGAGMSTESGIPDYRSPNGAYSTGFKPITHQEFLRSIKARRRYWAPSYAGWRRFTAAQPSTGHIALSSLEKAGHISFMITQNVDRLHHRAGSNPLGLHGTVYIVACTNCGFSLPRDLFQDQVKAHNPKWAEAIENLDYDSRSDKSFGMKQRPDGDIEIDEKFWEEDFYIPECQSCQGVLKPDVVFFGDNVPKSRADAAMEAAKGCDAFLVLGSSLMTMSAFRLIKAAREAGAATAIINIGATRADDIVPLKISARVGEILPRLLNVGSLSIPAP

SEQ ID NO: 235 - DNA, 2396 bp, Solanum lycopersicum
aattttgaatagtataaaaaggacgtaattcttcattccccaaatctaggaattttgctctgaaaaagtgccgcactttgtctttgcggcagccggagagttgtgtataaccgagttttgtgctttcaaattcggaagaaatgggtcgttctcgggctgttcatcaatccactgatgatgatccaagccagaggtctaagagaaaaagggcagtgccaaatgtggagagttttgatactgcagctactggccaaatattgactgaagggaaaaaggctttgtaccattgcaattattgcaataaagacatatctggaaggattcggattaaatgtgttgtgtgttctgactttgatctttgtgtggaatgcttttctgttggagcagaagtgcagcctcacaaaagcaatcatctgtatagggttatggataacctgtcatttcctctcatatgtgctgactggaatgctgatgaggaaatgttacttctagagggtttggaaatgtacggattggcaaactgggctgaagttgccgaacatgttggaacgaagagtaaacagcagtgtattgaccactataagtccacctatattagttctccttgttttccgcttccggacatgtcccatgttatgggaaagaacagagaggaacttcttgccatggccaaggatcaaggatatgcagctcccgggggagttaatgttaaagaagagtctccattctctgcaggaatcaagatggaagatcaaagggaagaaaattcaactggacttgcctcagttggaggttctgcttctggtacattagcaggagctggaaagaggacatctagcttacttcatagtaaggagaatcatgatagcatcaaagtggaaggttgtcctgcagacaggagtgtcggagagaaaaagcctaggtcatcagtggacgaggggccttccatgacagaattaagtggttataattccaagagagaggagtttgaaattgaatacgataatgatgctgagcagatggtggctgatatggaatttaaagagacagataccaatgctgagcgtgaactgaaacttcgggtattgcgtatatacaataaaaggcttgatgagaggaaacgtaggaaggattttattttggaaaggaaactacttcatcctgatccttttgagaaagacctcaccccggaggagaaggacatatgccgtcgttacagggtgttcatgcgttttagttctaaagaggagcatgaggatttccttaggagcataatcgaggagcaccgaatagttaaacgaatacgagatcttcaggatgcccgaattgctggttgccgaactttagctgaggcagaaagatatgttgaacaaaagagagcgcgggaatctgaagaaaatatacgtagactgaaggagaacacccagagtggcccaagtggaaaatatttgcaaagagcaggtcactttaaagtggagcatgacagcagccccagaggagttggtaggggccctgaaatgatggattgttgcaatgacttatcatcaaccaccgcaccacatggtgttggaagtgctgtagacatttgggatgtcagtgggttttcaggagctgagttgctctcagaagctgaaaaaaagctttgtgatgagatgagaatcctgccggctcattatctaaacatgtcgcaaaccatgtccatggggatctttaatggcaacatcaccaagaaatctgatgcgcatggtctattcaatgttgatccgaataagattgacaaagtgtatgagatgcttgtcaaaaagggcctggctcaagcataatgttgctgctttacgggttcaagcgtgcttttatttattttctaccaaattggcaatgaagtaaaatggctggcctgttttcttagattctttcaagactatctaaaccattacgttagatgaaggttgctcaaggctcatctgttcaaaaagttatcacatacgtataacgagaggcaaagtcatgcagtggatatcctttatggttgatacccatagtagatatgaggttcgtaaaacaagcttttcatagtgttccagtaacgtcacaattattatggtgtggtaagttatctgttcgagaggaagcagtttaatggagagttatgctgttgtctgaggcttgtgtatacatgaggtttatacatccaactagattgtgaatagtttgctggttcacagcaagtatttgcaagtgtttcatttgcaattctttttcattttctgttgttggattgaatatttattttatgttggattatattatttatgtttttggattatattattttgttgttggattcagtatctattttcatgtcgttggataattttaaatcatgttgattatct

SEQ ID NO: 236 - protein, 560 aa, Solanum lycopersicum
MGRSRAVHQSTDDDPSQRSKRKRAVPNVESFDTAATGQILTEGKKALYHCNYCNKDISGRIRIKCVVCSDFDLCVECFSVGAEVQPHKSNHLYRVMDNLSFPLICADWNADEEMLLLEGLEMYGLANWAEVAEHVGTKSKQQCIDHYKSTYISSPCFPLPDMSHVMGKNREELLAMAKDQGYAAPGGVNVKEESPFSAGIKMEDQREENSTGLASVGGSASGTLAGAGKRTSSLLHSKENHDSIKVEGCPADRSVGEKKPRSSVDEGPSMTELSGYNSKREEFEIEYDNDAEQMVADMEFKETDTNAERELKLRVLRIYNKRLDERKRRKDFILERKLLHPDPFEKDLTPEEKDICRRYRVFMRFSSKEEHEDFLRSIIEEHRIVKRIRDLQDARIAGCRTLAEAERYVEQKRARESEENIRRLKENTQSGPSGKYLQRAGHFKVEHDSSPRGVGRGPEMMDCCNDLSSTTAPHGVGSAVDIWDVSGFSGAELLSEAEKKLCDEMRILPAHYLNMSQTMSMGIFNGNITKKSDAHGLFNVDPNKIDKVYEMLVKKGLAQA

SEQ ID NO: 237 - DNA, 1728 bp, Physcomitrella patens ssp. patens
atgggccgatcgcgaggagtgcatagtacacaagacgacgacacggcctggtttggtcacaggtctaagcggaggcgtgtggcggttggaggagatgttcctgagccttcagcagcaggggcttgtttctggactgcaggtgcgggagaagcaaaaaaagctctctatcactgcaattactgcattaaagacatttcaggaaccattcgaattaagtgcaataagtgccctgatttcgatctttgcgtagagtgcttctctgttggtgtggaaatcacacctcacaaatccaatcattcctatcgagtcattgataatctatcgtttcccctcatccaccctgaatggaacgccgatgaagaaattttgcttttggagggagttgagatgtacgggcttggaaattggggggaagcttcagagcacgtgggaacaaagactaagactcagtgttttggtcattatatgacaacgtacatgaattccatctgttctccgttacccgatatgtcccacgttatagggaaatcaaaggcagatctcttagccatggctcgctcacatcaagaaggcaagaaagggactttagatatcaagccactgctttcaactcctggaagtgagggagatgatggggatggtagagctggtggaagtcaagctattgattcaagcggtccttctggtggaccaggttcaaagtgtcaaaagacagcaggaggtacacaaggtgtggttcatgtcaaagaatcaccagataacactgcagctgatggagctcaaagtaatcgtactcttggtggcaagaagcctaaacctctagctgaggataataagggaggcattactagtacggatcagacggggtatcatgctaaacggcaagagtttgagccagagtacgacaatgaagccgaacatcaactggccgatatggagtttaaggataatgaccatgaaactgatcgggagttgaaacttcggatgttacatatttatatctcacgacttgacgaacggaaacgtaggaagaacttcatactagaaagaggtctcttgaacatcaagcgacagcaggtcctagataggaagcggagtaaagaagaaagagaattatacaatcgcagccgagtcttcatgcgctaccattcagcggaagaacatgaagcattgcttaacggtctgatttctgagcgaaaacttcgccaacgcattgaggaactgcaggagtacagaatggctttgggtcagaccttagcagagacgcagatacatggctctgaaatgaagaaagagacagagttgaatctaagaaatgctagagaaagcacgtcttacttgtataatggcaaattttcaacgcatcgagttaatcggtacttgagtagggagaaggaaggggaagctgcatttcctggcacaggttctggtggaaagagctcgaaaagaacttcagcatcttttgaacttggaggctttcctggtgtggacttactctctcacactgagcaagatctatgtgtacagcacaggctcatacctgctcattacttaaggatgaaggaacatctcatgctggagagcttgaagtcggggcaagttcgaaggtccgatgcacatcaaatgtttaaagtggatcccgtgaagactgatcgtgtttatgaactgctcctttcaaaaggttggatacaaggagatggacctactgcgtcagcttcggataggtga

SEQ ID NO: 238 - protein, 575 aa, Physcomitrella patens ssp. patens
MGRSRGVHSTQDDDTAWFGHRSKRRRVAVGGDVPEPSAAGACFWTAGAGEAKKALYHCNYCIKDISGTIRIKCNKCPDFDLCVECFSVGVEITPHKSNHSYRVIDNLSFPLIHPEWNADEEILLLEGVEMYGLGNWGEASEHVGTKTKTQCFGHYMTTYMNSICSPLPDMSHVIGKSKADLLAMARSHQEGKKGTLDIKPLLSTPGSEGDDGDGRAGGSQAIDSSGPSGGPGSKCQKTAGGTQGVVHVKESPDNTAADGAQSNRTLGGKKPKPLAEDNKGGITSTDQTGYHAKRQEFEPEYDNEAEHQLADMEFKDNDHETDRELKLRMLHIYISRLDERKRRKNFILERGLLNIKRQQVLDRKRSKEERELYNRSRVFMRYHSAEEHEALLNGLISERKLRQRIEELQEYRMALGQTLAETQIHGSEMKKETELNLRNARESTSYLYNGKFSTHRVNRYLSREKEGEAAFPGTGSGGKSSKRTSASFELGGFPGVDLLSHTEQDLCVQHRLIPAHYLRMKEHLMLESLKSGQVRRSDAHQMFKVDPVKTDRVYELLLSKGWIQGDGPTASASDR

SEQ ID NO: 239 - DNA, 1512 bp, Glycine max
atgggtcgctctcgtgggaatttccaccacgccgatgaggaccccaaccagaggtcaaggagaaaaaagaatgctgccagtggagagaattcggagtctggagctgcaggccaaggagcaggcgaagggaaaaaggctctgtaccactgcaattattgtaataaggatataacaggaaaaatccgtattaagtgtgccatgtgcccagattttgacttgtgtatagagtgcttttctgttggagctgaggtgacacctcataaaagcaaccacccttacagggttatggataatttgtctttccctcttatttgcccagactggaatgcagatgatgaaattttgcttctagagggaattgaaatgtatggcttgggaaactggacagaagttgccgagcatgttggaaccaaaaacaaagagtcatgcatagaacactataggaatgtatacctgaattccccgttctttcctgttccggatatgtctcatgttgttgggaaaaacagaaaagaacttcttgccatggcgaaagggcagggtgaagacaagaaaggaatttccatggcggatcttagtataaaggcagaatcttccttttctccatctagagtcaaggttgaagattcgcataaagctggctctgctaatcgtttggcatccagtttgaattcaggtccttctttagtagaatcgagtggttataacgccaaaagacaggaatttgatcctgaatatgataatgacgctgaacaactacttgctgaaatggaatttaaggacactgacactgatgatgagcgagagctgaaactacgggtgttgcgtttctatgcaaaaaggcttgatgaaagaaagcgaaggaaggatttcatacttgaaagaaatttgttatacccaaatccatttgagaaggattttacacctgaggagaaggcaatatgtcggaattatgacttattcatgcgctttcatactaaggaggagcatgaggaattgcttagaaccgttatctctgaacatagaactcgtaaaagacttcaagaccttaaggaagcccgggctgctggttgccgcaattcagctgaagctgatagatatctggcacaaaagagaaaaagggaagctgaagaaagtgctcgtaggacaaaagaaagtgctcagggtggcccaagcaatctaggggtttctaatgcattgatgtctccagactctgctggcaaggatttgagaggaagacctgcagggcctgctacttctagttctgtcaatgaaatggacgtgacaggatactatggggcagatttactttctgaatcggagaaacgtttatgctgtgagctaaggttgcctccagccatgtatctaaagatgcaagagcagctgtctctacaaatacttgctggcactgtcactgcaaaatctgatgctcatcaattgttcaagatggatgccatgaaaattgacagggtgtatgatattctcattaaaaaggggattggttccccctga

SEQ ID NO: 240 - protein, 503 aa, Glycine max
MGRSRGNFHHADEDPNQRSRRKKNAASGENSESGAAGQGAGEGKKALYHCNYCNKDITGKIRIKCAMCPDFDLCIECFSVGAEVTPHKSNHPYRVMDNLSFPLICPDWNADDEILLLEGIEMYGLGNWTEVAEHVGTKNKESCIEHYRNVYLNSPFFPVPDMSHVVGKNRKELLAMAKGQGEDKKGISMADLSIKAESSFSPSRVKVEDSHKAGSANRLASSLNSGPSLVESSGYNAKRQEFDPEYDNDAEQLLAEMEFKDTDTDDERELKLRVLRFYAKRLDERKRRKDFILERNLLYPNPFEKDFTPEEKAICRNYDLFMRFHTKEEHEELLRTVISEHRTRKRLQDLKEARAAGCRNSAEADRYLAQKRKREAEESARRTKESAQGGPSNLGVSNALMSPDSAGKDLRGRPAGPATSSSVNEMDVTGYYGADLLSESEKRLCCELRLPPAMYLKMQEQLSLQILAGTVTAKSDAHQLFKMDAMKIDRVYDILIKKGIGSP

SEQ ID NO: 241 - DNA, 2194 bp, Oryza sativa; identical to SEQ ID NO: 43

SEQ ID NO: 242 - DNA, 51 bp, Artificial sequence
  primer: prm18906
ggggacaagtttgtacaaaaaagcaggcttaaacaatgggtcgttctcggg

SEQ ID NO: 243 - DNA, 49 bp, Artificial sequence
  primer: prm18907
ggggaccactttgtacaagaaagctgggtccgtaaagcagcaacattat

SEQ ID NO: 244 - DNA, 4031 bp, Physcomitrella patens ssp. patens
gctttttaacttctacatcgcgggtgagcttgatcgagcgggacttttcttagttgctcttatgtaacgactgaccgtgaggaagattctacagtggacctggatattatcagctgccagggttctgtaacattgttttgtcatcatgccgcggagacgcaagaccccgcgggaacttgaggagagtgcccaagctcaggctttagcagaagctcaagcatcggcattagcaggagcggaggggtcagctccttcagctgttgcgccggaacctgcttcgactccgactccagctgctggtggagctgctgttccagcccctattccagtgtcagcacctgcacagcacgttgcttctcaacatgttgagggccagggccatggtcaagctcactcccagcatttaggagagggctcgcaaggccaaggttcggggcattctcagggacagaggcaaaggcaaggacaagggcaagggcaaggtcaaggacaggggcaaggtcaaggacaggggcaaggtcaaggacaggggcaaggtcaaggacaggggcaagggcaaggacaggggcaagggcaagggcaaggacgcgatgaacccaatagcagtggacctcctgggcgggcgagaggaggcatgggaggaggcgagcgaggttctggaaggaggggtggcaggagccgctataatcagggaccccctgtgcatttcgctgcactgcctgcaggctatggatcaggtgtaggtccagttgttgagcagttcgggtcagtggttatagggggtgttggacctcgtttcaactctggtccaactcaagagcaagctgtttctaaatacgagccgccacccacgcctccaccgatttctagcaaacagttgagatttcctttgcgtccagaccgaggaaggatcggtctgaggtgtattgtgaaggcaaatcatttttttgtcgagctacctgacaaagatcttcatcagtacgatgtgactatcactccagaggtcacatccaggggtatcaacagggccgtcatggagcagcttgtgaagctttacagagagtcacacttgagctccaggcttcctgcgtatgatggtcggaagagtttgtataccgctgggccacttccgtttcagagcaaggaattccagatcagtcttttggacgaggatgatggaaccaaccaacctagacgggagaggcttttcaaagtggttatcaagtttgctgctcgagcagatttgcatcatcttgggcaatttcttcttggacgccaagctgatgctcctcaagaagccttgcaagtcctagatatcgtattgagggagcttcctacccaccggtgcgtttattctcctgtaggacgctcgttctattctcccaatctgggcactcgacagccgttaggagatggtcttgaaagctggcggggcttttatcaaagtattcgaccaactcaaatgggattgtccctaaacattgacatgtcttccacagcgttcatagaacccaagactgtaatggagtttataagggatctcctcaacaaggagttgacccgtagcctaagtgatgccgatcgtatgaagatcaagaaagctcttcgcggagtcaaagtggaagtgactcatcgcggaagtatgcgtcgcaaataccgtatatctgggcttacccatcaggctactaatgaactcgaatttccagttgatgagaatgggacattgaagtctgtcaccgactattttcgggaaacatacggctattttatccgtcatccgtctttgccgtgccttcaagtgggtaattctctgcgtcccaactaccttcccatggaagtatgcaagatcgttgaaggccagcgatattcgaaacggttgaatgagcgccaaattacagctcttctcaaagtaacttgccagcgacctcgagacagagaagcagatattatgcagacagtacaccacaatgcataccaccaagatccctatgctcaagagtttgggatcagaattagtaatgagcttgcgcaagtggaggcacgagtcctgccagctccacggctgaagtaccatgatactggcagggaaaaggagtgtcttccacaagttggacagtggaatatgatgaataagaaaatggtgaacggcggtatcgtgaactactgggcatgtatcaatttttcacgcactgtccaagagaatgtggcgaagaacttctgccaagagctggctcagatgtgccacacatccgggatgcaatttacaagagatcccgttgtgcctttgcaaagctaccgacccgagcactcggaccgagctctgtttcagctatgtgatgacgtgcacaaaaagactaagggcaagagcttggatctccttattgcaatccttccagacaacaacgggcctttgtatggtgatttgaagaagcaatgtgagactgtactgggtgtggtttctcagtgttgtttgaccaagcatgttttcaagatgagcaagcagtacctggcaaacgtggctctcaaaattaatgtcaaggttgggggtcggaacactgtcctggtggatgcacttacacgcaagattcctctcgtcagtgatattcccaccataatatttggtgcagatgttactcatccacatcctggagaggactccagtccctccattgctgcagtggtagcttcgcaggattggcccgaggtcaccaagtatgcagggttggtgtgtgctcaagctcaccgtcaggagttgattcaggatctgtacaaggaatggagggacccccagaaaggcacgatgacaggagggatgataaaggaactccttatctctttccggtgtgcgaccggtcaaaagccacttcggattatcttttacagagatggagtaagtgaaggtcaattttaccaggttcttctgtatgaactggacgcaatcaggaaagcttgcgcttcccttgaaccggattaccagcctccagtcacatttgtggtcgttcagaaaagacaccacactcgtttatttgccagcaatcataatgacaatcgctctactgatagaagtggcaacattttaccagggactgtagtggactcaaagatctgtcatcctacagaattcgatttctatctttgtagtcatgctgggattcagggaaccagtcgacctgcgcattaccatgtgctgtgggatgagaacaaattttctgcggatagtttacagtcgttgacaaataatctgtgctatacatatgcacggtgcacgcgctctgtttctattgttcctccagcatattatgcacatctagctgcttttcgtgccaggttctacatggatccagaagcttcagatactggttctgttactagtgggttgggaggggcgaatcgcagtcagtttactggatcgactgctggccgcactcatcgtgcggcgggaggaaatgccgtgcgcccacttccacctcttaaggagaatgtgaagagagtcatgttctactgttaaattgcgatacgtcaggacatcacacagcgatgacctgcttgagtatccagtcaatttggacgtgtgtagctttgctatgtccaattttgaaaccttgacttgaaaagccaagaatgacatcatgcttcaatgaagcagcttagcatatgcttcaaaggaaacataaatactgggtatagtaatgggttatgatatagaattagtcacaatatggcattttgtaactatggaattgggtttacttcatgtatgtggactacaattggaagctacaagccggacggtaaacttaggctgataatgtagctcttgtatgtcgtcttttgtagtcactttgggtccatcattgtcaaaaccaatgagttggttttgttatgatttggtcctttttccccaggtcttagtgttaagccagattgaaggatatggaagttttattaacagtagtgactttgataaagctattgtgctgaagctggtatttaaactaattatattgggctcatcaactaattatatcttc

SEQ ID NO: 245 - protein, 1120 aa, Physcomitrella patens ssp. patens
MPRRRKTPRELEESAQAQALAEAQASALAGAEGSAPSAVAPEPASTPTPAAGGAAVPAPIPVSAPAQHVASQHVEGQGHGQAHSQHLGEGSQGQGSGHSQGQRQRQGQGQGQGQGQGQGQGQGQGQGQGQGQGQGQGQGQGQGQGQGRDEPNSSGPPGRARGGMGGGERGSGRRGGRSRYNQGPPVHFAALPAGYGSGVGPVVEQFGSVVIGGVGPRFNSGPTQEQAVSKYEPPPTPPPISSKQLRFPLRPDRGRIGLRCIVKANHFFVELPDKDLHQYDVTITPEVTSRGINRAVMEQLVKLYRESHLSSRLPAYDGRKSLYTAGPLPFQSKEFQISLLDEDDGTNQPRRERLFKVVIKFAARADLHHLGQFLLGRQADAPQEALQVLDIVLRELPTHRCVYSPVGRSFYSPNLGTRQPLGDGLESWRGFYQSIRPTQMGLSLNIDMSSTAFIEPKTVMEFIRDLLNKELTRSLSDADRMKIKKALRGVKVEVTHRGSMRRKYRISGLTHQATNELEFPVDENGTLKSVTDYFRETYGYFIRHPSLPCLQVGNSLRPNYLPMEVCKIVEGQRYSKRLNERQITALLKVTCQRPRDREADIMQTVHHNAYHQDPYAQEFGIRISNELAQVEARVLPAPRLKYHDTGREKECLPQVGQWNMMNKKMVNGGIVNYWACINFSRTVQENVAKNFCQELAQMCHTSGMQFTRDPVVPLQSYRPEHSDRALFQLCDDVHKKTKGKSLDLLIAILPDNNGPLYGDLKKQCETVLGVVSQCCLTKHVFKMSKQYLANVALKINVKVGGRNTVLVDALTRKIPLVSDIPTIIFGADVTHPHPGEDSSPSIAAVVASQDWPEVTKYAGLVCAQAHRQELIQDLYKEWRDPQKGTMTGGMIKELLISFRCATGQKPLRIIFYRDGVSEGQFYQVLLYELDAIRKACASLEPDYQPPVTFVVVQKRHHTRLFASNHNDNRSTDRSGNILPGTVVDSKICHPTEFDFYLCSHAGIQGTSRPAHYHVLWDENKFSADSLQSLTNNLCYTYARCTRSVSIVPPAYYAHLAAFRARFYMDPEASDTGSVTSGLGGANRSQFTGSTAGRTHRAAGGNAVRPLPPLKENVKRVMFYC

SEQ ID NO: 246 - DNA, 4031 bp, Physcomitrella patens ssp. patens; identical to SEQ ID NO: 244

SEQ ID NO: 247 - protein, 338 aa, Physcomitrella patens ssp. patens
MSKQYLANVALKINVKVGGRNTVLVDALTRKIPLVSDIPTIIFGADVTHPHPGEDSSPSIAAVVASQDWPEVTKYAGLVCAQAHRQELIQDLYKEWRDPQKGTMTGGMIKELLISFRCATGQKPLRIIFYRDGVSEGQFYQVLLYELDAIRKACASLEPDYQPPVTFVVVQKRHHTRLFASNHNDNRSTDRSGNILPGTVVDSKICHPTEFDFYLCSHAGIQGTSRPAHYHVLWDENKFSADSLQSLTNNLCYTYARCTRSVSIVPPAYYAHLAAFRARFYMDPEASDTGSVTSGLGGANRSQFTGSTAGRTHRAAGGNAVRPLPPLKENVKRVMFYC

SEQ ID NO: 248 - DNA, 3302 bp, Populus trichocarpa
tagaagtgttttgcttttgtaggtatcatcatggtgaggaagagaagaaccgaaattcctcaaagtgggggtgagagttctgagtcgcaggaaactgatactggtcggggtgcccagcccccagctgagaggagtggtccacctcaacagggaggaggtggaggaggataccaaggtggaaggggttggggtccccagtctcagcaaggaggtcgtggaggtgggtatggtggacgaggccggggagggatgcaacaacagcaatatggtggagcccctgagtaccagggccggggaagagggcaacctcagcaaggaggtcgaggatatggtggtggtcgtcctggaggtggccgcggagggccatcttcaggtggatttagaccaccagcacccgagctgcaccaagctaccccagctccttatccagctgtggtgaccactcagcccacgccatctgaggcaagttcttcgatgcgaccaccagagccatcgctagcaactgtatcgcagcagctgcagcaactatctgttgagcaagaaggttcttctagccaggcgattcagccgctgccagcctcaagtaaatcagtgaggttccctcttcgaccaggaaaaggtagcactggcattaggtgtattgtaaaggccaatcacttctttgctgagctaccagataaggatttgcaccaatatgatgtcaccataacaccagaggtcacatcaaggggtgttaatcgagctgtaatggaacaactggttaaactgtaccgggaatctcatcttggaaagcgtcttcctgcttatgatggacggaagagtctatatactgccggagcacttccttttcaggcgaaagatttcaagatcaccctcattgacgatgatgatggatcaggcgggccaaggagagagagagaattcaaagttacaatcaaattggctgctcgtgctgacctgcaccacttgggactttttttgcggggacagcaagctgatgcgcctcaggaagcccttcaagttcttgatatagttctgcgtgaattgcctactgctaggtattgtcctgtgggtcgatcattttattcccctgacctaggaaggagacaatcacttggtgagggcttggagagttggcgtggtttctatcaaagtattcgtcctactcagatgggactatcgctgaacattgatatgtcatccacggccttcattgagccactgccagtcattgattttgtgactcagttattaaatcgtgacgtttcctctagaccgttgtctgattctgatcgtgtaaagattaaaaaggcactaagaggcgtcaaagttgaagttacacaccgtggaaatatgcgcagaaagtaccgtatttctggcttaacatcacaggcaacacgggagctgactttcccggttgatgaaagaggaaccctgaaatctgtcgtggagtacttctacgaaacctatggttttgtaattcaacaccctcaatggccttgtctacaagtaggaaatcaacagagacctaattatttgcctatggaggtctgcaagattgttgagggtcagaggtactccaaaagattgaacgagagacagataactgcattgttgaaggtgacctgccagcgtcctcaggaaagggagaaagatattatgcagcagacggtttatcacaatgcataccacaatgatccatatgcaaaggagtttggtatcaaaatcagtgataagcttgcttcagttgaagctcgcattctgcctcccccatggcttaagtatcatgacacaggcagagagaaggattgtcttcctcaagttgggcagtggaatatgatgaataagaaaatggtcaatgggggaagagtgaataattggatctgcgtcaatttttcacgaaatgtgcaagacagtgtggctcgaggattttgctatgaacttgcacaaatgtgtcaaatttctggcatggactttgctcttgagccattgctggctcctgtcagtggtcgtcctgagcatgtagaaagggttttgaaaaatcgataccatgaagcaatgaccaagctccggccccatagcaaggaacttgacttgcttattgtgattctccctgacaacaatggttctctttatggtgatttgaagcgtatttgtgagacagatcttgggcttgtttcccagtgctgtttgacaaagcatgtgttcaaaatgagcaagcaatatcttgctaatgtggctttgaagataaatgtgaaggttggaggaaggaatacagtacttgtggatgcaatatctagacgtatccctctagtcagcgaccgacctactattatttttggtgctgatgttactcatcctcatcctggggaggactcaagcccatctattgcagccgttgtggcttcgcaagattggccagaggttaccaaatatgctggcctggtttgtgctcaagcccaccgacaagagcttatccaagatttatataaaacatggcaggatcctgtacgagggacagtgtctggtggcatgatcaaggagcttctcatatccttccgtagggcaaccgggcagaagccacagcgaattatattctacagagatggtgtcagtgaaggacagttttatcaagttttgttgtacgagcttgatgctattcgtaaggcatgtgcttctttagagcccaattaccagcctcctgtgacatttgttgtggttcagaagcgtcatcacacaaggctgtttgcaaatgatcaccgtgaccgcaatgctgttgacaggagtgggaatatattgcctggtactgttgtggactcgaagatctgccatcctactgaattcgacttctatttgtgtagtcacgctgggattcagggcacaagccgtccagctcattaccatgtactttgggatgagaacaagtttactgctgatgggctgcagtccctgacaaacaatctttgctacacatatgcacgatgcacgagatctgtttccattgtgccacctgcatactatgctcatcttgctgcatttcgagctcgtttctacatggagccagagacatcagacagtgaatcaattgcaagtggcatggctggtggtcgtggaggtgctggtgggggtcctcgtccaacacgtggacctggtgctaatgctgctgtgaggcctttacctgccttgaaggagaatgtcaagcgggttatgttctactgctaggatcgttggaaatcccctacttttggatgggcatttaaattttactagttgaaactgttctgttcggaaagcgggggagg

SEQ ID NO: 249 - protein, 1063 aa, Populus trichocarpa
MVRKRRTEIPQSGGESSESQETDTGRGAQPPAERSGPPQQGGGGGGYQGGRGWGPQSQQGGRGGGYGGRGRGGMQQQQYGGAPEYQGRGRGQPQQGGRGYGGGRPGGGRGGPSSGGFRPPAPELHQATPAPYPAVVTTQPTPSEASSSMRPPEPSLATVSQQLQQLSVEQEGSSSQAIQPLPASSKSVRFPLRPGKGSTGIRCIVKANHFFAELPDKDLHQYDVTITPEVTSRGVNRAVMEQLVKLYRESHLGKRLPAYDGRKSLYTAGALPFQAKDFKITLIDDDDGSGGPRREREFKVTIKLAARADLHHLGLFLRGQQADAPQEALQVLDIVLRELPTARYCPVGRSFYSPDLGRRQSLGEGLESWRGFYQSIRPTQMGLSLNIDMSSTAFIEPLPVIDFVTQLLNRDVSSRPLSDSDRVKIKKALRGVKVEVTHRGNMRRKYRISGLTSQATRELTFPVDERGTLKSVVEYFYETYGFVIQHPQWPCLQVGNQQRPNYLPMEVCKIVEGQRYSKRLNERQITALLKVTCQRPQEREKDIMQQTVYHNAYHNDPYAKEFGIKISDKLASVEARILPPPWLKYHDTGREKDCLPQVGQWNMMNKKMVNGGRVNNWICVNFSRNVQDSVARGFCYELAQMCQISGMDFALEPLLAPVSGRPEHVERVLKNRYHEAMTKLRPHSKELDLLIVILPDNNGSLYGDLKRICETDLGLVSQCCLTKHVFKMSKQYLANVALKINVKVGGRNTVLVDAISRRIPLVSDRPTIIFGADVTHPHPGEDSSPSIAAVVASQDWPEVTKYAGLVCAQAHRQELIQDLYKTWQDPVRGTVSGGMIKELLISFRRATGQKPQRIIFYRDGVSEGQFYQVLLYELDAIRKACASLEPNYQPPVTFVVVQKRHHTRLFANDHRDRNAVDRSGNILPGTVVDSKICHPTEFDFYLCSHAGIQGTSRPAHYHVLWDENKFTADGLQSLTNNLCYTYARCTRSVSIVPPAYYAHLAAFRARFYMEPETSDSESIASGMAGGRGGAGGGPRPTRGPGANAAVRPLPALKENVKRVMFYC

SEQ ID NO: 250 - DNA, 3302 bp, Populus trichocarpa; identical to SEQ ID NO: 248

SEQ ID NO: 251 - protein, 336 aa, Populus trichocarpa
MSKQYLANVALKINVKVGGRNTVLVDAISRRIPLVSDRPTIIFGADVTHPHPGEDSSPSIAAVVASQDWPEVTKYAGLVCAQAHRQELIQDLYKTWQDPVRGTVSGGMIKELLISFRRATGQKPQRIIFYRDGVSEGQFYQVLLYELDAIRKACASLEPNYQPPVTFVVVQKRHHTRLFANDHRDRNAVDRSGNILPGTVVDSKICHPTEFDFYLCSHAGIQGTSRPAHYHVLWDENKFTADGLQSLTNNLCYTYARCTRSVSIVPPAYYAHLAAFRARFYMEPETSDSESIASGMAGGRGGAGGGPRPTRGPGANAAVRPLPALKENVKRVMFYC

SEQ ID NO: 252 - DNA, 3812 bp, Oryza sativa
tcccatcacgctactgctcccgcccccatctctcacccttcttcccctagctaccccctgctcacggagaaagacaacccagtcgggtcggtaattccgctccatttccagcgcgcgccgcatgaacgatcggtgatctcgacatggcgctgcagttggagaatggccgtccccatcatcatcaagtgcccatcatggtgaagaagaaaagaactgggtctggcagcaccggtgagagttctggagaggctccaggagctcctggccatggttcttcacagcgagctgagagaggtcctcaacagcatgggggaggacgtggttgggtgcctcaacatggtggccgtggtggtgggcaataccagggccgtggtggacattatcagggccgtggagggcaaggttcacaccatccaggtggagggcctcctgagtatcagggtcgtggagggccaggttcacatcatccaggtggtgggcctcctgactatcagggccgtggaggatcaggttcacatcacccaggtggtgggcctcccgagtatcaaccgcgtgactatcaaggacgtggtggtccacgccccagaggtggaatgccacagccatactatggcggacctagggggagtggcggacgtagtgttccttcaggttcatcaagaacagttcccgagctgcaccaagccccacatgtccaataccaagccccgatggtttcaccaaccccatcgggagctggctcatcctctcagcctgcggcggaggtgagcagtggacaagtccaacaacagtttcagcaacttgccacccgtgatcaaagttcgaccagccaagccattcaaatagcaccaccgtcaagcaaatcagttagattcccgttgcgccctggcaagggtacatatggggacaggtgcattgtgaaggcgaaccatttctttgctgaacttcctgataaagaccttcaccaatacgacgtatctattactcctgaggttacttcacgtggcgtgaatcgtgctgttatgtttgagttagtaacgctgtatagatattcccatttgggcgggcgtctacctgcctatgatggaaggaagagtctttacacagctggaccattgccatttgcttctaggacatttgaaattactcttcaagatgaggaagatagtcttggtggtggccaaggcacccaaaggcgtgagagactatttagggtggtgatcaagtttgctgcccgtgctgatcttcaccatttggctatgtttctagctggaaggcaagcagatgctcctcaagaagcccttcaagtccttgacattgtgttacgtgaattgcctaccacaaggtactcaccagttggtcggtcattttattctcccaatttagggagacgccagcaacttggtgagggtttggaaagttggcgtggtttttaccaaagcataaggcctacccagatgggtctctcactgaatattgatatgtcatcaactgcatttattgagcctctacctgtgattgactttgttgctcagcttctgaacagagacatctcagttagaccattatctgattctgatcgtgtgaagataaagaaagctctaagaggtgtgaaggttgaggtgacgcatagaggaaacatgcgtagaaaatatcgtatatctggactcacttcacaggcaacaagggagttatcattccctgtcgatgatcgtggtactgtgaagactgtggtgcaatattttctggagacatatggttttagtattcagcacaccactttgccttgccttcaagtgggcaatcagcaaaggcccaattatctgcctatggaggtttgtaagatcgttgagggacagcgttactcgaagcggcttaacgagaaacagattactgcgctattgaaagtgacttgccagcgacctcaagagcgtgaactggatattttgcggactgtatctcacaatgcataccatgaagatcagtatgcgcaggaatttggcataaaaattgatgagcgtcttgcatctgttgaagctcgtgttctgcctcccccaaggcttaaataccatgatagtgggagagaaaaggatgtattgccgagagttggccagtggaacatgatgaataagaaaatggtcaatggtgggagagtcaacaactgggcatgtattaacttctctagaaatgtgcaagatagtgctgccaggggcttctgtcatgagctggctatcatgtgccaaatatctggaatggattttgcactggaacctgtgctgcccccacttactgctagacctgaacatgtggaaagagcactgaaggcacgctatcaagatgcaatgaacatgctcagaccgcagggcagggaacttgatttactgattgtaatactgcctgacaataatggttctctttatggggatctcaaaagaatctgtgagactgatcttggattggtctcccaatgttgtttgacaaaacatgtttttaaaatgagcaagcagtatcttgcaaatgttgcccttaaaataaacgttaaggtggggggaaggaatactgtacttgtggatgctttgacaaggaggattccccttgtcagtgacagaccaactatcatatttggtgcggatgttactcatcctcatcctggagaagattccagtccttccattgcagctgtggttgcttctcaagactggcctgaagtcactaagtatgctggattggtgagtgcccaagcccatcgtcaagaattgatacaagatcttttcaaagtatggcaagacccgcatagaggaactgttactggtggcatgatcaaggagcttctcatttctttcaagagggctactggacagaaacctcagaggataatattttacagggatggtgtcagcgaggggcagttttatcaagttttgttgtatgagcttgatgccattagaaaggcttgtgcatccctggaacccaactatcagcctccagttacctttgtggtggtccagaagcggcatcacacaaggttgtttgctaataatcacaacgaccagcgtactgttgatagaagtggaaacattctgcctggaactgttgttgactcaaagatttgccatccaaccgagtttgatttctacctgtgtagccatgctggcatacagggaacaagccgtcctgctcattatcatgttctgtgggatgagaacaaatttactgcagacgagttgcaaaccctcacgaacaacttgtgctacacgtatgcaaggtgcactcgctctgtatcaattgtgcctcctgcgtactatgctcatctggcagccttccgagctcgcttttacatggagccagagacatctgacagtggatcaatggcgagtggagctgcaacgagccgtggccttccaccaggtgtgcgcagcgccagggttgctggaaatgtagccgtcaggcctctacctgctctcaaggaaaacgtgaagcgtgtcatgttttactgctaagagcttgggctgtaccccgtatgcgccaaggaatgtagtactatgttatgttattttagcacttgcactctgtcgttgatcccgttaaaacgggtatgctaccataagctgttggactattctgggtattgtagtactacttgttttgtatttgtgtttgtgacgctgcagagcgtgaacaacgcaagtctggtacttgtatcgttgtgtttgtgggaacctaaatcttgttggacctttgttgtgcttgaagaaccaagttaaataatcctgtcagtatagggatttaattgctgcttggcataacttatt

SEQ ID NO: 253 - protein, 1118 aa, Oryza sativa
MALQLENGRPHHHQVPIMVKKKRTGSGSTGESSGEAPGAPGHGSSQRAERGPQQHGGGRGWVPQHGGRGGGQYQGRGGHYQGRGGQGSHHPGGGPPEYQGRGGPGSHHPGGGPPDYQGRGGSGSHHPGGGPPEYQPRDYQGRGGPRPRGGMPQPYYGGPRGSGGRSVPSGSSRTVPELHQAPHVQYQAPMVSPTPSGAGSSSQPAAEVSSGQVQQQFQQLATRDQSSTSQAIQIAPPSSKSVRFPLRPGKGTYGDRCIVKANHFFAELPDKDLHQYDVSITPEVTSRGVNRAVMFELVTLYRYSHLGGRLPAYDGRKSLYTAGPLPFASRTFEITLQDEEDSLGGGQGTQRRERLFRVVIKFAARADLHHLAMFLAGRQADAPQEALQVLDIVLRELPTTRYSPVGRSFYSPNLGRRQQLGEGLESWRGFYQSIRPTQMGLSLNIDMSSTAFIEPLPVIDFVAQLLNRDISVRPLSDSDRVKIKKALRGVKVEVTHRGNMRRKYRISGLTSQATRELSFPVDDRGTVKTVVQYFLETYGFSIQHTTLPCLQVGNQQRPNYLPMEVCKIVEGQRYSKRLNEKQITALLKVTCQRPQERELDILRTVSHNAYHEDQYAQEFGIKIDERLASVEARVLPPPRLKYHDSGREKDVLPRVGQWNMMNKKMVNGGRVNNWACINFSRNVQDSAARGFCHELAIMCQISGMDFALEPVLPPLTARPEHVERALKARYQDAMNMLRPQGRELDLLIVILPDNNGSLYGDLKRICETDLGLVSQCCLTKHVFKMSKQYLANVALKINVKVGGRNTVLVDALTRRIPLVSDRPTIIFGADVTHPHPGEDSSPSIAAVVASQDWPEVTKYAGLVSAQAHRQELIQDLFKVWQDPHRGTVTGGMIKELLISFKRATGQKPQRIIFYRDGVSEGQFYQVLLYELDAIRKACASLEPNYQPPVTFVVVQKRHHTRLFANNHNDQRTVDRSGNILPGTVVDSKICHPTEFDFYLCSHAGIQGTSRPAHYHVLWDENKFTADELQTLTNNLCYTYARCTRSVSIVPPAYYAHLAAFRARFYMEPETSDSGSMASGAATSRGLPPGVRSARVAGNVAVRPLPALKENVKRVMFYC

SEQ ID NO: 254 - DNA, 3812 bp, Oryza sativa; identical to SEQ ID NO: 252

SEQ ID NO: 255 - protein, 334 aa, Oryza sativa
MSKQYLANVALKINVKVGGRNTVLVDALTRRIPLVSDRPTIIFGADVTHPHPGEDSSPSIAAVVASQDWPEVTKYAGLVSAQAHRQELIQDLFKVWQDPHRGTVTGGMIKELLISFKRATGQKPQRIIFYRDGVSEGQFYQVLLYELDAIRKACASLEPNYQPPVTFVVVQKRHHTRLFANNHNDQRTVDRSGNILPGTVVDSKICHPTEFDFYLCSHAGIQGTSRPAHYHVLWDENKFTADELQTLTNNLCYTYARCTRSVSIVPPAYYAHLAAFRARFYMEPETSDSGSMASGAATSRGLPPGVRSARVAGNVAVRPLPALKENVKRVMFYC

SEQ ID NO: 256 - DNA, 2194 bp, Oryza sativa; identical to SEQ ID NO: 43

SEQ ID NO: 257 - DNA, 56 bp, Artificial sequence
  primer: prm18910
ggggacaagtttgtacaaaaaagcaggcttaaacaatgagcaagcaatatcttgct

SEQ ID NO: 258 - DNA, 50 bp, Artificial sequence
  primer: prm18911
ggggaccactttgtacaagaaagctgggtttccaacgatcctagcagtag

SEQ ID NO: 259 - DNA, 56 bp, Artificial sequence
  primer: prm18912
ggggacaagtttgtacaaaaaagcaggcttaaacaatgagcaagcagtatcttgca

SEQ ID NO: 260 - DNA, 50 bp, Artificial sequence
  primer: prm18913
ggggaccactttgtacaagaaagctgggtagcccaagctcttagcagtaa

SEQ ID NO: 261 - DNA, 3407 bp, Triticum aestivum
gtgaagttttttttcctccctcattcggatcgggatcagagagagatcctccctcctcctccccggatcaggccggccaaaccccctctcccggatctcggatcgggaggcggaggccgacccctcccccaaggtgctatcatggcagcaagcacaggggcttcaggatggctaaggggcaaggtgaaggctgtgacgtctggagactgccttctcatcatggggagcacaaaggcagagattccaccagagaagtccatcactctgtcataccttatggccccaaggctggctcgtcgtggtggagtggatgagccatttgcttgggaaagcagggagtatctgaggaaactctgcgtaggaaaggaggtcacatttagagtggattacactgctcctaacatcggacgagaatttggcactgtctaccttggcgacaagaacgttgcctacttggtggttgctgcaggatgggcaagggtgaaggagcaaggccccaaggggggtgaaccactcccaaatgtctctgagcttctgaggttggaggaagttgctaagcaacagggtttaggccgttggagcaaggaacctggtgctgctgaagattcgataagagatcttccaccatcagcaattggcgaactaagtggttttgatgcaaagggttttgcagttgcaaataaaggcaagagtctggaagccattgtcgaacaagttcgtgatggcagtaccattcgtgtttacttgcttccaagtttccaatttgtccagatatatgtcgctggagtgcaggctccgtccatggggagacgaccaccgaatcctactgttgttgccgaaccagagggcactactaacggcactacaaatggtgacgattctggggaagctcctgcaccactgacaacagcacaaaggcttgctgcatcgacagcctctactgaagttccaccagataggtttggaagagaagctaagcatttcacagagactcgagttctgaacagagatgtgcggattgtggtggaggggacagacagtttcagtaatataattggttcggtgtattacccagatggtgacactgctaaggacttgtcccttgagcttgttgaaaatggtcttgcgaaatatgtggagtggagtgcgaacatgctagatgttgaagttaaaataaagctgaagaatgctgaacttcaggcaaaaaaggaacagctgagaatttggactggatttaagccaccagtgacaaattcaaagccaatccatgatcagaaattcactggaaaagtggtagaagttgtgagtggagattgtattattgttgctgatgatgctgctccttatggaagtccttcagcagaacgtcgggttaatctttcaagtattagagctcctaagctcggcaatcctcgcagggaggacaacaagcccgacaaatttgctcgtgaatctaaggaattcttgcgcacacggttgattggcaaacaggtgactgtggaaatggaatattctagaaggatcagcaccatggatggacagaatgctgtgcctgtaatgaactcggctgataccagagttttggattatggttcagtttttctaggttcgccatcaccggcggacggagatgacacatcttctgctccaagcacaggcacccagcctaaaattaatgttgctgagcttttgctctcacggggcttcgctgagatatcaaaacaccgtgactacgaggaaagatcacattattttgatgctctattagcggctcactcacgtgctgagaaagcaaagaaaggaattcactctgacaaacttcctcctgtgatgcatataacagatttaacaatggttaattctaagaaggccaaagatttccttcccttcctgcagcggaatagaaggcatactgctgttgttgaatatgtgttcagcggtcatcgtttcaaactaacaattccgaaggagacttgcagcatcgctttttctttgtctggtgttaggtgccctggtaaagatgagccctactcgagcgaagctattgctttgatgaggaggatgattctacagcgtgatgtggagattgaggttgaaacagttgatagaactggaacattcataggttccttgtgggagtctaagaccaatgtgggttctgttcttttggagtctggcttggccaagcttagttcatttggcttggataggattccagatgctcatgtcctcacaagagctgaaaagttagcaaagcagcagaaactgaagatatgggagaactacgtcgagggtgaagaagttactaatgggtcagcctctgaatccaaacaaaaggaaattctcaaggttgttgctactgaagttcttggtggtggaaagttctatgcccagacagtaggtgaccagagagtagcttccatccaacaacagcttgcatccttgaaacttaaggaggcaccagtcattggtgcttttaatcctgggaagggagagatagtccttgctcagtttagcctcgacaactcttggaatagagccatgattgttaatggaccccgaggagctgtagagtctgtagatgacaaatttgaagtattctacattgattttggtaaccaagaagtggttccttacaaccgcatccggcctgcagacccatcagtatcctcctctcctcctcttgctcagctgtgcagccttgccttcatcaaagtgcctggtctggaagatgataatggtcaggaagcagcagagtatcttagtgaatgcttgctaagcagttcaaaacaataccgggcaatgatcgaagagcgcgacactactggtggaaaagtgaagggacaaggcactggacctgttctcattgtgactcttgttgatccagagacagaatccagcatcaatgctgccatgctcgaggaagggcttgcccgacttgaaaggggcaagagatgggacaccaaggagaggaagacagctctcgagaatctggaacagttccaggagaaggcgaagaaggaaaggctgcggctgtggcagtatggagacgtcgaatctgacgaggaagatcaagctccaggcgggaggagacccccgccgcgtcggtagacgagataatgccgcggcaggcagtggcgcagtcatggtttagatatgaaagttttggacaccgagcggaactcagtcgagagcttatatatgaaaactagtgagagagagaagactatatttatgcaattagaagagaactatatacattgtttttcccctaagctcaataaggtctgtgtcctttgtggactgcgtttcttctttgtagagacagaacatataatactgaggattgcagtcaaatggaaattaaattcaggtttgatactttaatataccaaataaagtgactt

SEQ ID NO: 262 - protein, 989 aa, Triticum aestivum
MAASTGASGWLRGKVKAVTSGDCLLIMGSTKAEIPPEKSITLSYLMAPRLARRGGVDEPFAWESREYLRKLCVGKEVTFRVDYTAPNIGREFGTVYLGDKNVAYLVVAAGWARVKEQGPKGGEPLPNVSELLRLEEVAKQQGLGRWSKEPGAAEDSIRDLPPSAIGELSGFDAKGFAVANKGKSLEAIVEQVRDGSTIRVYLLPSFQFVQIYVAGVQAPSMGRRPPNPTVVAEPEGTTNGTTNGDDSGEAPAPLTTAQRLAASTASTEVPPDRFGREAKHFTETRVLNRDVRIVVEGTDSFSNIIGSVYYPDGDTAKDLSLELVENGLAKYVEWSANMLDVEVKIKLKNAELQAKKEQLRIWTGFKPPVTNSKPIHDQKFTGKVVEVVSGDCIIVADDAAPYGSPSAERRVNLSSIRAPKLGNPRREDNKPDKFARESKEFLRTRLIGKQVTVEMEYSRRISTMDGQNAVPVMNSADTRVLDYGSVFLGSPSPADGDDTSSAPSTGTQPKINVAELLLSRGFAEISKHRDYEERSHYFDALLAAHSRAEKAKKGIHSDKLPPVMHITDLTMVNSKKAKDFLPFLQRNRRHTAVVEYVFSGHRFKLTIPKETCSIAFSLSGVRCPGKDEPYSSEAIALMRRMILQRDVEIEVETVDRTGTFIGSLWESKTNVGSVLLESGLAKLSSFGLDRIPDAHVLTRAEKLAKQQKLKIWENYVEGEEVTNGSASESKQKEILKVVATEVLGGGKFYAQTVGDQRVASIQQQLASLKLKEAPVIGAFNPGKGEIVLAQFSLDNSWNRAMIVNGPRGAVESVDDKFEVFYIDFGNQEVVPYNRIRPADPSVSSSPPLAQLCSLAFIKVPGLEDDNGQEAAEYLSECLLSSSKQYRAMIEERDTTGGKVKGQGTGPVLIVTLVDPETESSINAAMLEEGLARLERGKRWDTKERKTALENLEQFQEKAKKERLRLWQYGDVESDEEDQAPGGRRPPPRR

SEQ ID NO: 263 - DNA, 3420 bp, Solanum lycopersicum
attgttacggattttcttctaaaaaaaaatcttcgatccgccgcccgccaccgaacacagcgttgacattctcgtctctgcccggattccggtttaccgtcgttctgaagcaatccaattcacatgatttggtagctgatttgcttttagattcgtacgttaatctgctttctctcttctcctctgtctacgatcgatccattcagcgctagtcattcaggcatttagcagttgaaatggcatcaacaggatggttgaagggaaaagtgaaagctgttccctctggtgacagtttggttataatgggtagttccaaggctgaaataccccctgaaaaatctattaccttaggatctctaatggctccacgattggcacgtcgtggtggagtggatgagccatttgcatggcaaagcagagacttcttgaggaagctttgcattggaaaggaggtcactttcaaggtggaatatgctgtaccttccatagggcgagaatatggcactgtttttcttggtgacaagaacgtttccatgctagttgttgctgcaggctgggccaaggtcagggagcagggtcaacagaaagacgcgaatccctatttaaaacagctgcaagatgctgaagaacaagccaagcaacaaggtctaggtcgttggagtagggcacctggtgcttctgaggcatctattaggaatctacctccatctgcgatcggtgatgctagtaactttgatgcaatgggtctattggagcgaaataaaggtaagcttatagaagcatttgttgagcaggttcgtgatggaagtacgctgcgagtgtatttgcttccagacttccagttcattcaagtgttcgttgctggaatacaggcaccaactatgggaagaagagcaacatcagaaactattattaatactcgtgttacctctgatgaaccaaatggagaatcaattactgaacctcgtgcaactccgacatcagcacagaggttggcgtcttcagcagcatctgtaacagaagtttctcctgatccttatggcagagaagcaaagcattttactgaaacccgtgtcttaaatagagatgttcgaattgtactggagggtgttgacaagtatagcaatctaattggctcagtgtactaccctgatggagaatcagcaaaggacctgggattggagcttattgaaaatgtctatgctaaatacgttgattggagtgcaaacatgctggaaggtgaagccaagaagaagctgaaaaatgctgagcttgaggccaaaaagacacgcttaagaatctggacgaactatgtagctccagcaacaaattccaaggctattcatgatcaaaatttcacaggaaaggtggttgaggttgtcagtggagattgtcttgttatagctgatgattctctgccatttggagatccatcagcagagagaagagttaatctttcaagtattaggtctcctaaaatgggaaatccccgtagagatgagaaacctgctccatatgctcgtgaagcaaaggaatttttgagaaatcgcctcattggaaaacaggtgcatgtttcaatggagtactctcggaaggtcaacatggcagatggacctgctgctcccgccagtagcgcagattcaagggtgatggattttggaactgtattcctggcatccaaagatggggatgatgcatcgcctgctccatctgctgcaggcaaccagttggctggagtcaatgttgctgagcttttggttgcccgtggttttgcaactgttgttagacatcgtgatttcgaagaacgttcaaactattatgatgcgcttctctcagcggaatcacgtgctacttctgggaaaaagggcattcattctcctaaagaagctccggtgatgcatgtaacggacctgctaacggcagcgtcaaagaaagctagagacttcttgcctttcctgcagcgtaacaggaggatgtctgctgtagttgagtatgtcctcagtggtcatagattcaaactgttcattcccaaggagacttgcagcattgctttctctatttctggagtgagatgccccggtcgggaagaaccctactctgaggaagccattgccttgatgaggcggaagataatgcagagagatgtcgagatcgaggtagaaacagttgatagaacagggactttcattggaacattatgggaatcaagatctaatgtggcagtgaccctactggaagctggtttagcaaggcttcaaacttcttttggagctgatagaatcccagaagttcacctcctcttgcaagctgaacaggctgccaaaaggcagaaattgaagatatgggagaattatgtcgagggagaggaagttgtcagtagtggagcagctgacagacgtcaaaaggaagagttgaaggtcactgtcactgaaattttgggtgagggtaaattttatgttcagctggtttccgaccagaaagtagccgccattcagaagcaacttgcttctctaaatcttcaggaggctcctgtaattggtgcctttaatcccaagaagggtgatatagttctagcgcaattcagtgctgataattcatggaaccgagcaatgattgtcaatgcccctcgtggtgctgtggaatcttccaaagacaagttcgaagttttctatgttgattatggaaaccaagaagttgtttcgtacagtcaattgcggcccctcgaagcatccgtgtcctccagtcctggtcttgctcagctctgcagtcttgcccatgttaaagttcctggactagaagatgattatggccaggaggcggcataccggctaagtgagcttcttctaagtgggccaaaggaatttaaagctgtcatcgaggagaaagacacttcaggtggaaaagttaaaggtcaaggaacagggacaatctttttggtgactttggttgatcccgaaagtgatgtcagtgtgaatgctactttgctcaaggaaggacttgctaggatggagaaaaggaagaggtgggtgcccaaggacaaaaaagaggctctggatgaattggagaagcatcaaacagaagcacgagaaaagagacgtgcgatgtgggagtatggagatgtcgagtcagatgaggaggatatccctgctaggaaacctgctgggaaacggtgaatgctgcaacagagttgaactggtggcaatagccctggggcctctcaagctaaagttcaaccatcatacaaacaaaacaatttttctgtctcaaggaaatagagaggttaaagttcgagatagcttaaatgtggtgttcacatgtaactttaggaaagaatagacttcagaaggtgagagaaactttgttttctctcttgttttcccttataaaatatttttataaaaaagttaaattattagactg

SEQ ID NO: 264 - protein, 978 aa, Solanum lycopersicum
MASTGWLKGKVKAVPSGDSLVIMGSSKAEIPPEKSITLGSLMAPRLARRGGVDEPFAWQSRDFLRKLCIGKEVTFKVEYAVPSIGREYGTVFLGDKNVSMLVVAAGWAKVREQGQQKDANPYLKQLQDAEEQAKQQGLGRWSRAPGASEASIRNLPPSAIGDASNFDAMGLLERNKGKLIEAFVEQVRDGSTLRVYLLPDFQFIQVFVAGIQAPTMGRRATSETIINTRVTSDEPNGESITEPRATPTSAQRLASSAASVTEVSPDPYGREAKHFTETRVLNRDVRIVLEGVDKYSNLIGSVYYPDGESAKDLGLELIENVYAKYVDWSANMLEGEAKKKLKNAELEAKKTRLRIWTNYVAPATNSKAIHDQNFTGKVVEVVSGDCLVIADDSLPFGDPSAERRVNLSSIRSPKMGNPRRDEKPAPYAREAKEFLRNRLIGKQVHVSMEYSRKVNMADGPAAPASSADSRVMDFGTVFLASKDGDDASPAPSAAGNQLAGVNVAELLVARGFATVVRHRDFEERSNYYDALLSAESRATSGKKGIHSPKEAPVMHVTDLLTAASKKARDFLPFLQRNRRMSAVVEYVLSGHRFKLFIPKETCSIAFSISGVRCPGREEPYSEEAIALMRRKIMQRDVEIEVETVDRTGTFIGTLWESRSNVAVTLLEAGLARLQTSFGADRIPEVHLLLQAEQAAKRQKLKIWENYVEGEEVVSSGAADRRQKEELKVTVTEILGEGKFYVQLVSDQKVAAIQKQLASLNLQEAPVIGAFNPKKGDIVLAQFSADNSWNRAMIVNAPRGAVESSKDKFEVFYVDYGNQEVVSYSQLRPLEASVSSSPGLAQLCSLAHVKVPGLEDDYGQEAAYRLSELLLSGPKEFKAVIEEKDTSGGKVKGQGTGTIFLVTLVDPESDVSVNATLLKEGLARMEKRKRWVPKDKKEALDELEKHQTEAREKRRAMWEYGDVESDEEDIPARKPAGKR

SEQ ID NO: 265 - DNA, 2194 bp, Oryza sativa; identical to SEQ ID NO: 43

SEQ ID NO: 266 - DNA, 52 bp, Artificial sequence
  primer: prm18914
ggggacaagtttgtacaaaaaagcaggcttaaacaatggcagcaagcacagg

SEQ ID NO: 267 - DNA, 50 bp, Artificial sequence
  primer: prm18915
ggggaccactttgtacaagaaagctgggtggcattatctcgtctaccgac

SEQ ID NO: 268 - DNA, 54 bp, Artificial sequence
  primer: prm18916
ggggacaagtttgtacaaaaaagcaggcttaaacaatggcatcaacaggatggt

SEQ ID NO: 269 - DNA, 50 bp, Artificial sequence
  primer: prm18917
ggggaccactttgtacaagaaagctgggtgttcaactctgttgcagcatt

SEQ ID NO: 270 - DNA, 966 bp, Oryza sativa
atgaagtttgccaagaagtacgagaagtacatgaaggggatggatgaggagctcccgggcgtggggctgaagcggctcaagaaattgctcaagaaatgccgctctgacctccaatcccacgagaacgacggctcctccgccggccgctgccccggccattgctctgtatgtgatgggagttttttcccatctcttctcaatgagatgtcagccgttattggctgcttcaatgaaaaggccaagaagcttctcgagttgcacctggcatcaggtttcaagaaatatacaatgtggttcaccagcaagggtcacaagagccatggggcattgatacagcaaggcaaagacttggttacttatgcaattataaatgccgtggccatgaggaaaattttaaagaaatatgacaagatacattacttgaagcaagggcaggaattcaaagctcaagcccagagtctgcatattgaaatacttcaatccccatggctctgtgagctgatggctttctacatgaacttgagaagaagcaagaagaacaacggtgctatggagctctttggggattgttctctcgtattcgatgatgacaaaccaacaatttcatgcaacctctttgactctatgcgtgtcgacattagcttgacatgttcgatttgcttggataccgtgtttgatccagttgctctttcctgtggccacatatattgctacttgtgcagctgttctgctgcatccgttacgatcgttgatgggctgaagtctgccgagcgcaaatcaaagtgcccactgtgccgacaggcaggagtctttcctaatgctgtacacttggatgagctgaacatgctactaagctatagttgtccagagtactgggagaagagaatacagatggagcgggttgaacgtgttcgtctggctaaggaacactgggagtcacagtgcagggcattcttgggcatgtga

SEQ ID NO: 271 - protein, 321 aa, Oryza sativa
MKFAKKYEKYMKGMDEELPGVGLKRLKKLLKKCRSDLQSHENDGSSAGRCPGHCSVCDGSFFPSLLNEMSAVIGCFNEKAKKLLELHLASGFKKYTMWFTSKGHKSHGALIQQGKDLVTYAIINAVAMRKILKKYDKIHYLKQGQEFKAQAQSLHIEILQSPWLCELMAFYMNLRRSKKNNGAMELFGDCSLVFDDDKPTISCNLFDSMRVDISLTCSICLDTVFDPVALSCGHIYCYLCSCSAASVTIVDGLKSAERKSKCPLCRQAGVFPNAVHLDELNMLLSYSCPEYWEKRIQMERVERVRLAKEHWESQCRAFLGM

SEQ ID NO: 272 - DNA, 1008 bp, Arabidopsis thaliana
atgaagttttgtaagaagtatgaagagtacatgcaaggacagaaggagaagaagaatcttcctggtgttgggtttaagaaactcaagaagattctcaagagatgcaggagaaatcatgttccttctagaatttcttttactgatgcaatcaaccacaattgttctcgtgaatgcccagtttgtgatgggacttttttcccggagcttctcaaggaaatggaagatgttgttggatggtttaacgagcatgctcagaagcttcttgagcttcatttagcttctggttttacaaagtgtcttacttggctcagaggcaacagtcgaaaaaaggaccatcatggtttgatccaagagggtaaagatttggttaattacgctctcatcaatgccgtcgccattcgaaaaatcctcaagaaatatgacaagattcatgagtctaggcaaggacaagcgtttaagactcaggtccagaaaatgcgaatagaaatccttcagtcaccgtggctctgcgagcttatggcgtttcacatcaatctgaaagaatctaagaaggaatctggagctactataacttctcctcctcctcctgttcatgcattgtttgatggttgcgctttgactttcgacgatgggaagcctttactttcctgcgagctctctgattccgtcaaagttgacattgacttgacttgttcaatatgcctggacacggtgtttgatccaatatctctaacctgcggtcacatatattgctacatgtgtgcttgctctgctgcatcagtaaacgtagttgatggcttgaaaaccgcagaagcaactgaaaaatgcccgctttgccgtgaggatggggtttataaaggtgctgttcacttggatgagctcaatattttacttaagcgaagctgcagagactattgggaagaaaggcgtaaaacagagagagcagaaaggttacaacaagcaaaggaatattgggattaccaatgccgaagcttcactggaatatga

SEQ ID NO: 273 - protein, 335 aa, Arabidopsis thaliana
MKFCKKYEEYMQGQKEKKNLPGVGFKKLKKILKRCRRNHVPSRISFTDAINHNCSRECPVCDGTFFPELLKEMEDVVGWFNEHAQKLLELHLASGFTKCLTWLRGNSRKKDHHGLIQEGKDLVNYALINAVAIRKILKKYDKIHESRQGQAFKTQVQKMRIEILQSPWLCELMAFHINLKESKKESGATITSPPPPVHALFDGCALTFDDGKPLLSCELSDSVKVDIDLTCSICLDTVFDPISLTCGHIYCYMCACSAASVNVVDGLKTAEATEKCPLCREDGVYKGAVHLDELNILLKRSCRDYWEERRKTERAERLQQAKEYWDYQCRSFTGI

SEQ ID NO: 274 - DNA, 1002 bp, Arabidopsis thaliana
atgaagttttgtaagaagtatgaagagtacatgcaaggacagaaggagaagaagaatcttcctggtgttgggtttaagaaactcaagaagattctcaagagatgcaggagaaatcatgttccttctagaatttcttttactgatgcaatcaaccacaattgttctcgtgaatgcccagtttgtgatgggacttttttcccggagcttctcaaggaaatggaagatgttgttggatggtttaacgagcatgctcagaagcttcttgagcttcatttagcttctggttttacaaagtgtcttacttggctcagaggcaacagtcgaaaaaaggaccatcatggtttgatccaagagggtaaagatttggttaattacgctctcatcaatgccgtcgccattcgaaaaatcctcaagaaatatgacaagattcatgagtctaggcaaggacaagcgtttaagactcaggtccagaaaatgcgaatagaaatccttcagtcaccgtggctctgcgagcttatggcgtttcacatcaatctgaaagaatctaagaaggaatctggagctactataacttctcctcctcctcctgttcatgcattgtttgatggttgcgctttgactttcgacgatgggaagcctttactttcctgcgagctctctgattccgtcaaagttgacattgacttgacttgttcaatatgcctggacacggtgtttgatccaatatctctaacctgcggtcacatatattgctacatgtgtgcttgctctgctgcatcagtaaacgtagttgatggcttgaaaaccgcagaagcaactgaaaaatgcccgctttgccgtgaggatggggtttataaaggtgctgttcacttggatgagctcaatattttacttaagcgaagagactattgggaagaaaggcgtaaaacagagagagcagaaaggttacaacaagcaaaggaatattgggattaccaatgccgaagcttcactggaatatga

SEQ ID NO: 275 - protein, 333 aa, Arabidopsis thaliana
MKFCKKYEEYMQGQKEKKNLPGVGFKKLKKILKRCRRNHVPSRISFTDAINHNCSRECPVCDGTFFPELLKEMEDVVGWFNEHAQKLLELHLASGFTKCLTWLRGNSRKKDHHGLIQEGKDLVNYALINAVAIRKILKKYDKIHESRQGQAFKTQVQKMRIEILQSPWLCELMAFHINLKESKKESGATITSPPPPVHALFDGCALTFDDGKPLLSCELSDSVKVDIDLTCSICLDTVFDPISLTCGHIYCYMCACSAASVNVVDGLKTAEATEKCPLCREDGVYKGAVHLDELNILLKRRDYWEERRKTERAERLQQAKEYWDYQCRSFTGI

SEQ ID NO: 276 - DNA, 1008 bp, Arabidopsis thaliana
atgaagtttggtgagacgttcacggaatatctacatggagaagaggaatggttcctggagaagtgtcgcttcgttgaatataagaaacttaagaaagtgttgaagaagtgcaagacatgtaactctacaaaatctgatgatggacaaatcatcccatctgctacttcttcatctttgtctgattcatgcgaatgcaaagcttgcccttggtgtgatcagatgttcttcgaggagctgatgaaagaagctactgacatagcgggatttttcaggtcaagagtgaggcatcttctccatcttcatgtagccactgggatgcagagatacatgattcgcctacgcagatgcttcactgacgaaaaacaagctttagtccaagagggccaaatcttgattcaatacatcaccatgaatgcaattgctatccgtaaaatcctcaagaaatatgacaaggtgcatagctcagagaatgggaagaatttcaagttgaaaatgcgagcggagcgcatagagctcttgcactcaccatggctcatagaacttggagccttttatctcaactctgggctagataatgttggaaacttcaagaattcgtttggccgtgtcgcttgtgaaaatctcaacgaagatcaaccagtgctaaaactcatgctgcctaactcaatagagctggagtatgatctaacttgtgcaatctgcctcgaaacggtattcaatccctatgctttaaagtgcggtcacatattttgtaactcgtgtgcatgctcggctgcttctgtattgattttccaaggcattaaagcagcgccccgacattcaaaatgtcccatctgcagagaggctggagtttacgcggaagcagttcacatgatcgagctgcatcttcttttaaagacacgaagcaaagaatattggaaggagaggatgatgaatgaacggtctgagatggtgaagcagtcgaagatgttttggaatgaacagacgaagcatatgatcggttattaa

SEQ ID NO: 277 - protein, 335 aa, Arabidopsis thaliana
MKFGETFTEYLHGEEEWFLEKCRFVEYKKLKKVLKKCKTCNSTKSDDGQIIPSATSSSLSDSCECKACPWCDQMFFEELMKEATDIAGFFRSRVRHLLHLHVATGMQRYMIRLRRCFTDEKQALVQEGQILIQYITMNAIAIRKILKKYDKVHSSENGKNFKLKMRAERIELLHSPWLIELGAFYLNSGLDNVGNFKNSFGRVACENLNEDQPVLKLMLPNSIELEYDLTCAICLETVFNPYALKCGHIFCNSCACSAASVLIFQGIKAAPRHSKCPICREAGVYAEAVHMIELHLLLKTRSKEYWKERMMNERSEMVKQSKMFWNEQTKHMIGY

SEQ ID NO: 278 - DNA, 1005 bp, Arabidopsis thaliana
atgaagtttggtgagacgttcacggaatatctacatggagaagaggaatggttcctggagaagtgtcgcttcgttgaatataagaaacttaagaaagtgttgaagaagtgcaagacatgtaactctacaaaatctgatgatggacaaatcatcccatctgctacttcttcatctttgtctgattcatgcgaatgcaaagcttgcccttggtgtgatcagatgttcttcgaggagctgatgaaagaagctactgacatagcgggatttttcaggtcaagagtgaggcatcttctccatcttcatgtagccactgggatgcagagatacatgattcgcctacgcagatgcttcactgacgaaaaacaagctttagtccaagagggccaaatcttgattcaatacatcaccatgaatgcaattgctatccgtaaaatcctcaagaaatatgacaaggtgcatagctcagagaatgggaagaatttcaagttgaaaatgcgagcggagcgcatagagctcttgcactcaccatggctcatagaacttggagccttttatctcaactctgggctagataatgttggaaacttcaagaattcgtttggccgtgtcgcttgtgaaaatctcaacgaagatcaaccagtgctaaaactcatgctgcctaactcaatagagctggagtatgatctaacttgtgcaatctgcctcgaaacggtattcaatccctatgctttaaagtgcggtcacatattttgtaactcgtgtgcatgctcggctgcttctgtattgattttccaaggcattaaagcagcgccccgacattcaaaatgtcccatctgcagagaggctggagtttacgcggaagcagttcacatgatcgagctgcatcttcttttaaagacacgcaaagaatattggaaggagaggatgatgaatgaacggtctgagatggtgaagcagtcgaagatgttttggaatgaacagacgaagcatatgatcggttattaa

SEQ ID NO: 279 - protein, 334 aa, Arabidopsis thaliana
MKFGETFTEYLHGEEEWFLEKCRFVEYKKLKKVLKKCKTCNSTKSDDGQIIPSATSSSLSDSCECKACPWCDQMFFEELMKEATDIAGFFRSRVRHLLHLHVATGMQRYMIRLRRCFTDEKQALVQEGQILIQYITMNAIAIRKILKKYDKVHSSENGKNFKLKMRAERIELLHSPWLIELGAFYLNSGLDNVGNFKNSFGRVACENLNEDQPVLKLMLPNSIELEYDLTCAICLETVFNPYALKCGHIFCNSCACSAASVLIFQGIKAAPRHSKCPICREAGVYAEAVHMIELHLLLKTRKEYWKERMMNERSEMVKQSKMFWNEQTKHMIGY

SEQ ID NO: 280 - DNA, 930 bp, Arabidopsis thaliana
atgaagtttggtgagacgttcacggaatatctacatggagaagaggaatggttcctggagaagtgtcgcttcgttgaatataagaaacttaagaaagtgttgaagaagtgcaagacatgtaactctacaaaatctgatgatggacaaatcatcccatctgctacttcttcatctttgtctgattcatgcgaatgcaaagcttgcccttggtgtgatcagatgttcttcgaggagctgatgaaagaagctactgacatagcgggatttttcaggtcaagagtgaggcatcttctccatcttcatgtagccactgggatgcagagatacatgattcgcctacgcagatgcttcactgacgaaaaacaagctttagtccaagagggccaaatcttgattcaatacatcaccatgaatgcaattgctatccgtaaaatcctcaagaaatatgacaaggtgcatagctcagagaatgggaagaatttcaagttgaaaatgcgagcggagcgcatagagctcttgcactcaccatggctcatagaacttggagccttttatctcaactctgggctagataatgttggaaacttcaagaattcgtttggccgtgtcgcttgtgaaaatctcaacgaagatcaaccagtgctaaaactcatgctgcctaactcaatagagctggagtatgatctaacttgtgcaatctgcctcgaaacggtattcaatccctatgctttaaagtgcggtcacatattttgtaactcgtgtgcatgctcggctgcttctgtattgattttccaaggcattaaagcagcgccccgacattcaaaatgtcccatctgcagagaggctggagtttacgcggaagcagttcacatgatcgagctgcatcttcttttaaagacacgaatattggaaggagaggatgatgaatga

SEQ ID NO: 281 - protein, 309 aa, Arabidopsis thaliana
MKFGETFTEYLHGEEEWFLEKCRFVEYKKLKKVLKKCKTCNSTKSDDGQIIPSATSSSLSDSCECKACPWCDQMFFEELMKEATDIAGFFRSRVRHLLHLHVATGMQRYMIRLRRCFTDEKQALVQEGQILIQYITMNAIAIRKILKKYDKVHSSENGKNFKLKMRAERIELLHSPWLIELGAFYLNSGLDNVGNFKNSFGRVACENLNEDQPVLKLMLPNSIELEYDLTCAICLETVFNPYALKCGHIFCNSCACSAASVLIFQGIKAAPRHSKCPICREAGVYAEAVHMIELHLLLKTRILEGEDDE

SEQ ID NO: 282 - DNA, 1068 bp, Centaurea solstitialis
atgaagttttgcaagaaatatgaagaatacatgcaaacacaagatcagaggaagctacctggtgttggtttcaagaatcttaagaagatcttgaaaagatgtcgtagagatatgaacaataataataataatcgtttaaggagttcgaataatgatagttctttacagcaatcgcaatcgtcttcttcttcttcattgcggcttaatgattcagctgtttctgatagtaatgcgtcctctgcggtttgtctacatccttgtccagtatgtgatggaagtttctttccgtcccttatgaaggagatgtctatggtcgtcggatgctttaacaagcgagcacaaaaggtgctcaatgttcatttagcaacggggttccgcaaatactatgtgtggtgcaaagacaagtttaaggggaagcatggtgctttaatacaagaaggtgaaaaccttgttggctatgcaatcatcaatgccatcgctatgcgaaagattctcaagaaatacgataagatacatgactctaagcaaggccaagcattcaagtcacaagtcaagagcatgcacatggaaatccttcagtctccatggctttgcgagcttatcgctttccatatcaatttgagtgaaacaaaggtggatatgaggaagggttctcgattattcgagcgttgctctctcatatttagtgacggaaaaccgtcgctttcttgtgagctctctgatacggtcaagtttgagatagacttgacttgctccgtatgcttggatactgtattcgatcccgtatatcttacttgtggacacatcttctgcttcatgtgtgcttgcaagtctggatcggtaacaattgtagatggattgaaggcaacaaaacctaccgcaaaatgtcctctttgtcgggaagcaggagtctatcagggatctctccatttggatgaactcaacattttactgagtcgaagttgtcccaaatattgggaggaaaggcttcgaaccgggagagcggaaaggattaggcagactaaggagcactggcaatcgcaatcccgtgcattcttaggaatctaa

SEQ ID NO: 283 - protein, 355 aa, Centaurea solstitialis
MKFCKKYEEYMQTQDQRKLPGVGFKNLKKILKRCRRDMNNNNNNRLRSSNNDSSLQQSQSSSSSSLRLNDSAVSDSNASSAVCLHPCPVCDGSFFPSLMKEMSMVVGCFNKRAQKVLNVHLATGFRKYYVWCKDKFKGKHGALIQEGENLVGYAIINAIAMRKILKKYDKIHDSKQGQAFKSQVKSMHMEILQSPWLCELIAFHINLSETKVDMRKGSRLFERCSLIFSDGKPSLSCELSDTVKFEIDLTCSVCLDTVFDPVYLTCGHIFCFMCACKSGSVTIVDGLKATKPTAKCPLCREAGVYQGSLHLDELNILLSRSCPKYWEERLRTGRAERIRQTKEHWQSQSRAFLGI

SEQ ID NO: 284 - DNA, 966 bp, Oryza sativa
atgaagtttgccaagaagtacgagaagtacatgaaggggatggatgaggagctcccgggcgtggggctgaagcggctcaagaaattgctcaagaaatgccgctctgacctccaatcccacgagaacgacggctcctccgccggccgctgccccggccattgctctgtatgtgatgggagttttttcccatctcttctcaatgagatgtcagccgttattggctgcttcaatgaaaaggccaagaagcttctcgagttgcacctggcatcaggtttcaagaaatatacaatgtggttcaccagcaagggtcacaagagccatggggcattgatacagcaaggcaaagacttggttacttatgcaattataaatgccgtggccatgaggaaaattttaaagaaatatgacaagatacattactcgaagcaagggcaggaattcaaagctcaagcccagagtctgcatattgaaatacttcaatccccatggctctgtgagctgatggctttctacatgaacttgagaagaagcaagaagaacaacggtgctatggagctctttggggattgttctctcgtattcgatgatgacaaaccaacaatttcatgcaacctctttgactctatgcgtgtcgacattagcttgacatgttcgatttgcttggataccgtgtttgatccagttgctctttcctgtggtcacatatattgctacttgtgcagctgttctgctgcatccgttacgatcgttgatgggctgaagtctgccgagcgcaaatcaaagtgcccactgtgccgacaggcaggagtctttcctaatgctgtacacttggatgagctgaacatgctactaagctatagttgtccagagtactgggagaagagaatacagatggagcgggttgaacgtgttcgtctggctaaggaacactgggagtcacagtgcagggcattcttgggcatgtga

SEQ ID NO: 285 - protein, 321 aa, Oryza sativa
MKFAKKYEKYMKGMDEELPGVGLKRLKKLLKKCRSDLQSHENDGSSAGRCPGHCSVCDGSFFPSLLNEMSAVIGCFNEKAKKLLELHLASGFKKYTMWFTSKGHKSHGALIQQGKDLVTYAIINAVAMRKILKKYDKIHYSKQGQEFKAQAQSLHIEILQSPWLCELMAFYMNLRRSKKNNGAMELFGDCSLVFDDDKPTISCNLFDSMRVDISLTCSICLDTVFDPVALSCGHIYCYLCSCSAASVTIVDGLKSAERKSKCPLCRQAGVFPNAVHLDELNMLLSYSCPEYWEKRIQMERVERVRLAKEHWESQCRAFLGM

SEQ ID NO: 286 - DNA, 1020 bp, Oryza sativa
atgaagttcggtgcaatatatgaagagtatcttcgggaacagcaagacaaatacctaacaaagtgctcacatgtggagtacaaacgtctcaaaaaggtactgaagaaatgtcgagttggtcgctcattgcaagaagactgccccaatggtgaccagcaggaggggaacaacgaatctccagatatttgcaaatgcaattcatgcacattgtgtgatcaaatgttctttacagaacttactaaggaggcttcagaaatagctggctgtttcagctctagagtacaacgtctcctaaatcttcatgtcccttcaggatttctacgctatatttggcgtgtaaggcaatgtttcatagatgatcaacaaatcatggttcaagaaggcagaatgttacttaattatgtaaccatgaatgctatcgctatccgtaaaattctgaagaagtatgacaaaatacatggttctgtcagtggtagagatttcaagagcaagatgcaaactgatcatattgaactgttgcagtccccttggctgatagaactgggtgctttccatctaaactgcaatagttcagatattgatgaaactgtggggttccttaagaatgagttcttcaagaatttttcctgtgatttgaccgaagcacgaccactaatgactatggctatttctgaaactatgaagtatgagtacagcctaacttgtccaatttgcttggatactttgttcaacccatatgcacttagctgtggccatctcttttgcaaaggctgtgcttgtggagctgcttctgtgtacatctttcaaggtgttaagtctgcacctcctgaggcgaagtgtcctgtatgccgatcggatggtgtctttgctcatgctgtgcatatgactgaacttgacttgctcatcaaaacaaggagcaaggattactggagacagagactgcgagaagagcagaatgagatggttaagcaatccaaagaatactgggactctcaggctatgctgtcaatgggaatttga

SEQ ID NO: 287 - protein, 339 aa, Oryza sativa
MKFGAIYEEYLREQQDKYLTKCSHVEYKRLKKVLKKCRVGRSLQEDCPNGDQQEGNNESPDICKCNSCTLCDQMFFTELTKEASEIAGCFSSRVQRLLNLHVPSGFLRYIWRVRQCFIDDQQIMVQEGRMLLNYVTMNAIAIRKILKKYDKIHGSVSGRDFKSKMQTDHIELLQSPWLIELGAFHLNCNSSDIDETVGFLKNEFFKNFSCDLTEARPLMTMAISETMKYEYSLTCPICLDTLFNPYALSCGHLFCKGCACGAASVYIFQGVKSAPPEAKCPVCRSDGVFAHAVHMTELDLLIKTRSKDYWRQRLREEQNEMVKQSKEYWDSQAMLSMGI

SEQ ID NO: 288 - DNA, 951 bp, Medicago truncatula
atgaagttctgcaagacctatcaggagtacatgcaagctcaggagcagaagaagctccctgttgtgggattcaagaagctcaaaaagatcatgaaaaaatgtagacgatcttctcaattccataaaccttgccctgatcaatgcccattgtgcgatgggacctttttcccttcccttctcaatgaaatgtcagaaatagtgggatgctttaatcagcgtgcacagaaactgctggaacgacatcttgcttctggattccaaaagtacattctcatgttgaaaggaaaatcaaaaaggaatcatagtactttaattcatgaaggcagagatctagttacatatgcactcattaatgctgttgcaattcgcaaaatactaaagaaatacgataagattcattattctaagcaagggcaattattcaagtcacaagcccagactatgcacaaggaaattcttcagagtccctggcttattgagctgatggcattacatatcaatctacgggaaactaaagacaagccaaggaaggcaaccgcattattcaatggatgctgtctcacatttaaggatggaaaaccatcacttgcttgtgagctctttgattccatcaaaattgatattgatctgacttgctctatatgtttggacacagtgtttgatccagtttctctgacttgtggccacatattctgctacagttgtgcttgctcagctgcatctgttactattgttgatgggcttaaggaaacacattctaaagagaaatgtcctatgtgccgagaggcaggagtttatgaaggtgctgtacacttggaagaattgaatattttgttaggaaaaagctgcaaggagtactgggaggaaagacttcagatggaaagagtagagagggtcaagcaagcaaaggagcactgggaaacgcagtgtagagcattcatgggcatctaa

SEQ ID NO: 289 - protein, 316 aa, Medicago truncatula
MKFCKTYQEYMQAQEQKKLPVVGFKKLKKIMKKCRRSSQFHKPCPDQCPLCDGTFFPSLLNEMSEIVGCFNQRAQKLLERHLASGFQKYILMLKGKSKRNHSTLIHEGRDLVTYALINAVAIRKILKKYDKIHYSKQGQLFKSQAQTMHKEILQSPWLIELMALHINLRETKDKPRKATALFNGCCLTFKDGKPSLACELFDSIKIDIDLTCSICLDTVFDPVSLTCGHIFCYSCACSAASVTIVDGLKETHSKEKCPMCREAGVYEGAVHLEELNILLGKSCKEYWEERLQMERVERVKQAKEHWETQCRAFMGI

SEQ ID NO: 290 - DNA, 963 bp, Populus trichocarpa
atgaagttttgcaagaaatatcaggagtacatgcaaggacagcagaaacaactatccggggttgatttcaaaaagctcaaaaagattttgaagaagtgtaggaaagactttgaatctcaccaggaccatgatggccagtcctgtcctcaccattgtcccgtgtgcgatggtacctttttcccatcccttgtgaaggaaatgtctgcagtagttggttgcttcaataaacgtgcccagaaattacttgagctgcacctggcatctgggtttcgaaaatacttcatgtggttccaaggcaggttacaaaaagaccacgctgccttgattcaagaaggcaaggatctggttacctatgcactgatcaatgctattgcagttcgaaaaatactaaagaaatatgataagatccattactccaagcaaggacaggccttcaagtcaaaagctcaaagtatgcacattgagatccttcagtccccatggctttgtgagcttatggcttttcacattaatttaagggagacaaaggtcaagccaaacaaggcccctgcattgttcgaggggtgctcgctaacttttgatgatgacaaaccatcactctcttgtgagctttttgactccatcaagcttgatattgatttgacctgttctatatgcttggatactgtatttgatccagtttctctaacatgtggccatatattctgctatatgtgtgcttgttctgctgcttcagtgaccattgtcgatggactcaaggcagcagaacctaaagaaaaatgccctctatgccggaagaccggagtttacgaaggtgccctacacttggaagagcttaatattttattaagcagaagtttccacaagtactgggagcaacgacttcagacggaaaggatagagaggattcggcaggtgaaggagcactgggaatctcagtgtcgagcattcatgggcgtctag

SEQ ID NO: 291 - protein, 320 aa, Populus trichocarpa
MKFCKKYQEYMQGQQKQLSGVDFKKLKKILKKCRKDFESHQDHDGQSCPHHCPVCDGTFFPSLVKEMSAVVGCFNKRAQKLLELHLASGFRKYFMWFQGRLQKDHAALIQEGKDLVTYALINAIAVRKILKKYDKIHYSKQGQAFKSKAQSMHIEILQSPWLCELMAFHINLRETKVKPNKAPALFEGCSLTFDDDKPSLSCELFDSIKLDIDLTCSICLDTVFDPVSLTCGHIFCYMCACSAASVTIVDGLKAAEPKEKCPLCRKTGVYEGALHLEELNILLSRSFHKYWEQRLQTERIERIRQVKEHWESQCRAFMGV

SEQ ID NO: 292 - DNA, 975 bp, Glycine max
atgaaattcgggtctgcattcagagaatatctgcaggaggaacgggagtggctcgtggaccagaaatgtgcccacgttgaatatataaggttaaagaaagtgttgaagacttgccagaaagatacctcttcttctgataacaaggaccagttatgtcactgtcagtcttgcccattgtgtgatcaacagttcttctctgagttgatgaaggaagcatcagatgtagtaggatactttagttcaagagttaagaatctccttcatcttcatattgcaacaggaatgcagagatatgtattgcgtttgcgccagtgctttaaagatgataggcaagcccttacccaagaagggaggattctaattgagtacattgcaatgaatgctattgcaatgaggaaaatacttaagaaatatgataaagtacacagctctgtgaatggagagaatttcaaatctaggatgcatgccgaacacattgaaattttgcactcaccttggctaattgagttgggtgctttttatctgaattctagtggactggatagttgtgaccttgatggagtctatggtcgcttttcatgtgagctaaacataactaaagctgtaatgacattggttcttcccgattctattaatctcgagcatgatcttacttgtgcaatttgcctggattttgttttcaacccatatgctttgagttgtggtcatatcttctgcaagtcatgtgcttgctcagctgcctctgtgatgatttttcaaggccttaaagctgcaagtcctgagtcaaagtgtcctatatgcagagaggttggagtttattctaaggccgtgcatatgttagaacttgatctgcttgtgaaaagaaggtgcaaagactactggaaagagaggctagctggtgaacggggtgataagttgaagcaatccaatgactactggaatttacagtccacatattcaattggattgatgtag

SEQ ID NO: 293 - protein, 324 aa, Glycine max
MKFGSAFREYLQEEREWLVDQKCAHVEYIRLKKVLKTCQKDTSSSDNKDQLCHCQSCPLCDQQFFSELMKEASDVVGYFSSRVKNLLHLHIATGMQRYVLRLRQCFKDDRQALTQEGRILIEYIAMNAIAMRKILKKYDKVHSSVNGENFKSRMHAEHIEILHSPWLIELGAFYLNSSGLDSCDLDGVYGRFSCELNITKAVMTLVLPDSINLEHDLTCAICLDFVFNPYALSCGHIFCKSCACSAASVMIFQGLKAASPESKCPICREVGVYSKAVHMLELDLLVKRRCKDYWKERLAGERGDKLKQSNDYWNLQSTYSIGLM

SEQ ID NO: 294 - DNA, 975 bp, Glycine max
atgaagttctgcaaaaaataccaggagtacatgcaaggccaggagaagaagcttccgggcgtaggattcaagaagctcaaaaagatattgaagaagtgcaggagaaactcttcatcccagaaaccccttcatgcatcccttgccgccaaaacctgccccgaccattgcccagtgtgcgatgggaccttcttcccttcccttctcaatgaaatgtcagatatagtggggtgctttaatcagcgtgctcagaaattgttggagctacatctcgcttctggggtcagaaagtacttcttgtggatcaaaggcaaattacaagggaaccatacggctctgattcaagaaggcaaagatcttgttacttatgcactcataaatgccattgcaattcgaaaaatactgaaaaaatacgataagattcattattccaagcaagggcaattgttcaagtcgcagatccagagtatgcacaaggagattcttcaaagtccctggctttgtgagcttatggccttccatatcaatttaagggaaactaaggtcaagtcaaggaaggcacatgctttgttcgatggatgttctctcacattcaaggatgggaaaccggcacttacttgtgagctctttgattctatcaaagttgacattgacttgacttgttctatatgcttggacaccgtgtttgatccagtttctctgacttgcggccatatattctgctatatttgtgcatgctcagctgcatcagtatctattgttaacggacttaagtctgcagatcctaaaatgaagtgtcctctatgtcgtgagggagcagtttatgaaggtgctgtgcacttggaagaattaaatattctgttaagccgaagctgtcaggaatactgggagcagaggattcagacagaaagggtggagagggttaagcaaataaaggaacactgggattcacagtgtagggcattcgtgggcgtctaa

SEQ ID NO: 295 - protein, 324 aa, Glycine max
MKFCKKYQEYMQGQEKKLPGVGFKKLKKILKKCRRNSSSQKPLHASLAAKTCPDHCPVCDGTFFPSLLNEMSDIVGCFNQRAQKLLELHLASGVRKYFLWIKGKLQGNHTALIQEGKDLVTYALINAIAIRKILKKYDKIHYSKQGQLFKSQIQSMHKEILQSPWLCELMAFHINLRETKVKSRKAHALFDGCSLTFKDGKPALTCELFDSIKVDIDLTCSICLDTVFDPVSLTCGHIFCYICACSAASVSIVNGLKSADPKMKCPLCREGAVYEGAVHLEELNILLSRSCQEYWEQRIQTERVERVKQIKEHWDSQCRAFVGV

SEQ ID NO: 296 - DNA, 975 bp, Glycine max
atgaagttctgcaaaaagtatcaggaatacatgcaaggccaggagaagaaacttccatgtgtaggattcaagaagctcaagaagattctgaagaagtgcaggagaaactcttcatccctgaaaccccttaatgcatcccttgccgccaaaacctgccccgaccattgcccagtgtgcgatgggaccttcttcccttcccttctcaatgaaatgtcagatatagtggggtgctttaatcagcgggcgcagaaattgttggagctacatctcgcttctggggtcagaaagtacttcttctggatcaaaggcaaattacaagggaaccatactgcactgattcaagagggcaaagatcttgttacttatgcactcataaatgccattgcaattcgaaaaatactaaagaaatatgataagattcattattccaagcaagggcaattgttcaagtcacaagtccagagtatgcacaaggagattcttcaaagtccctggctttgtgagcttatggccttccacatcaatttaagggaaactaaggtcaagtcaaggaaggcacatgctttgttcgatggatgttctctcacattcaaggatgggaaaccgtcacttacttgtgagctctttgattctatcaaagttgacattgacttgacttgttctatatgcttggacacagtgtttgatccagtttctctgacttgtggccatatattctgctatatttgtgcatgctcggctgcatcggtatctattgtcaatggacttaagtctgcagatcctaaaatgaaatgtcctctatgtcgtgagggtgcagtttatgaaggtgctgtgcgcttggaagaactaaatattctgttaagccgaagttgtcaggaatactgggagcagaggcttcagacagagagggtggagagggttaagcaaataaaggaacactgggattcacagtgtagggcattcgtgggcgtctaa

SEQ ID NO: 297 - protein, 324 aa, Glycine max
MKFCKKYQEYMQGQEKKLPCVGFKKLKKILKKCRRNSSSLKPLNASLAAKTCPDHCPVCDGTFFPSLLNEMSDIVGCFNQRAQKLLELHLASGVRKYFFWIKGKLQGNHTALIQEGKDLVTYALINAIAIRKILKKYDKIHYSKQGQLFKSQVQSMHKEILQSPWLCELMAFHINLRETKVKSRKAHALFDGCSLTFKDGKPSLTCELFDSIKVDIDLTCSICLDTVFDPVSLTCGHIFCYICACSAASVSIVNGLKSADPKMKCPLCREGAVYEGAVRLEELNILLSRSCQEYWEQRLQTERVERVKQIKEHWDSQCRAFVGV

SEQ ID NO: 298 - DNA, 1023 bp, Hordeum vulgare
atgaagttcggttcaatatatgaggaatacctcagggcagagcaggacaaatatcttgctaaatgctcccatgtagagtacaaacgtctcaagaaggtattgaagcggtgccgacttgatcgctcattgcaagcagatggaaccaacagtgaccagcaggaggacagaagcgacgattcttcagatgcttgcgactgcaattcttgcacattgtgtgatcagatgttctttacagaactcaccaaggaggcttcggatatagctggctatttcagcactagagtacagcatcttctaaatcttcatgttccttcaggattgcaacggtatatatggcgcgtacgtcaatgcttcatagatgatcaacaaatcatggttcaagaaggcagactgctaatcaattatgtgactatgaatgctattgctattcgcaaaattctcaagaaatatgacaaagtgcatggttctgttagcggtagagatttcaggagcaagatgcaaactgagcatactgaactgctgcagtcaccttggctgattgagctgggtgctttccatctgaactgtgatagttcagatattgatgaacccgtaggcttcttcaagaacggattcttcaagaacttttcctgtgacttggcaggaacacagccagtaatgacaatggccatttctgaaactatgaaatatgactacagcctaacttgtccaatttgcttggacaccatattcaatccatacgcgctaagctgcggtcacctcttctgcaaaggctgtgcgtgtggcgctgcatccgtgtatatcttccagggtgtcaggagcgcgcctccagaggccaagtgccctgtatgccgagaggttggtgtgtttgctcatgccgtgcatatgaatgaacttgacctgctcatcaaaacaaggtgcaaagattactggagatgcagactacgcgaggagcgggccgagatggtgaagcaatccaaagaatactgggagtcccaggccatgctgtcgatgggcatctga

SEQ ID NO: 299 - protein, 337 aa, Hordeum vulgare
MKFGSIYEEYLRAEQDKYLAKCSHVEYKRLKKVLKRCRLDRSLQADGTNSDQQEDRSDDSSDACDCNSCTLCDQMFFTELTKEASDIAGYFSTRVQHLLNLHVPSGLQRYIWRVRQCFIDDQQIMVQEGRLLINYVTMNAIAIRKILKKYDKVHGSVSGRDFRSKMQTEHTELLQSPWLIELGAFHLNSDIDEPVGFFKNGFFKNFSCDLAGTQPVMTMAISETMKYDYSLTCPICLDTIFNPYALSCGHLFCKGCACGAASVYIFQGVRSAPPEAKCPVCREVGVFAHAVHMNELDLLIKTRCKDYWRCRLREERAEMVKQSKEYWESQAMLSMGI

SEQ ID NO: 300 - DNA, 951 bp, Medicago truncatula; identical to SEQ ID NO: 288

SEQ ID NO: 301 - protein, 316 aa, Medicago truncatula; identical to SEQ ID NO: 289

SEQ ID NO: 302 - DNA, 1020 bp, Oryza sativa
atgaagttcggtgcaatatatgaagagtatcttcgggaacagcaagacaaatacctaacaaagtgctcacatgtggagtacaaacgtctcaaaaaggtactgaagaaatgtcgagttggtcgctcattgcaagaagactgccccaatggtgaccagcaggaggggaacaacgaatctccagatatttgcaaatgcaattcatgcacattgtgtgatcaaatgttctttacagaacttactaaggaggcttcagaaatagctggctgtttcagctctagagtacaacgtctcctaaatcttcatgtcccttcaggatttctacgctatatttggcgtgtaaggcaatgtttcatagatgatcaacaaatcatggttcaagaaggcagaatgttacttaattatgtaaccatgaatgctatcgctatccgtaaaattctgaagaagtatgacaaaatacatggttctgtcagtggtagagatttcaagagcaagatgcaaactgatcatattgaactgttgcagtccccttggctgatagaactgggtgctttccatctaaactgcaatagttcagatattgatgaaactgtggggttccttaagaatgagttcttcaagaatttttcctgtgatttgaccgaagcacgaccactaatgactatggctatttctgaaactatgaagtatgagtacagcctaacttgtccaatttgcttggatactttgttcaacccatatgcacttagctgtggccatctcttttgcaaaggctgtgcttgtggagctgcttctgtgtacatctttcaaggtgttaagtctgcacctcctgaggcgaagtgtcctgtatgccgatcggatggtgtctttgctcatgctgtgcatatgactgaacttgacttgctcatcaaaacaaggagcaaggattactggagacagagactgcgagaagagcggaatgagatggttaagcaatccaaagaatactgggactctcaggctatgctgtcaatgggaatttga

SEQ ID NO: 303 - protein, 339 aa, Oryza sativa
MKFGAIYEEYLREQQDKYLTKCSHVEYKRLKKVLKKCRVGRSLQEDCPNGDQQEGNNESPDICKCNSCTLCDQMFFTELTKEASEIAGCFSSRVQRLLNLHVPSGFLRYIWRVRQCFIDDQQIMVQEGRMLLNYVTMNAIAIRKILKKYDKIHGSVSGRDFKSKMQTDHIELLQSPWLIELGAFHLNCNSSDIDETVGFLKNEFFKNFSCDLTEARPLMTMAISETMKYEYSLTCPICLDTLFNPYALSCGHLFCKGCACGAASVYIFQGVKSAPPEAKCPVCRSDGVFAHAVHMTELDLLIKTRSKDYWRQRLREERNEMVKQSKEYWDSQAMLSMGI

SEQ ID NO: 304 - DNA, 999 bp, Physcomitella patens
atgaagttcgggaagacgtacactgagtttattgagaaggacgtggttagcaaccaattggcagggtgctcttacgtggagtttaaaaggttgaagaaagtcctaaagaaatgcccagcgcacgactcttccagctccggcgatgagcttgatccctgcaccccttgctcttcaaattcatgttgcgacgcaaagtttttcggtgaattgatggaggagctggccgaagtggttggttgcttcaatagtcgcgcagagcagttggtcaagttgcacctagcgacagggttacgagggtacattttgcgagggaaacgtaacaaccatgaagctatgattcaggagggtcagcttcttattaactacgcctcaatgaatgcgctcgctgttcgaaaaatattgaaaaaatatgataaggttcatggatccactgaaggaggtctattcaaaagccgtttaataaccttgcggggtgagctcttgaagtcgccgtatttggtcgaactgggagcgttgaatattaatcttgcggatgctaaagagggttttccgacagagatggaatcagtcggtgaattttcgtgtgacctagagagttcatcaccgactctcacttgcaagctgcaagcatccgcgaccctggagttcgatttgtcatgctccgtatgcttggagccactgtttgagcctgtagccttggggtgtgggcacttattctgcaacaactgcgcttgcaccgccgcatccgtgctggggcacgagggccccaaaacagctgagtgcgatgcaaaatgccccctctgtcgacaggctggagtctatcccgacgcggtcaaactgaaggagcttggggttttgataaagaatagatgccctgagtactggaaagagcgatctcaacgagaacgggaacagcagctgaagttgaaaaaggaattatacgaccaacacttggaaatgcttctaaacatgcggaattcaatgcttcgctttgcttaa

SEQ ID NO: 305 - protein, 332 aa, Physcomitella patens
MKFGKTYTEFIEKDVVSNQLAGCSYVEFKRLKKVLKKCPAHDSSSSGDELDPCTPCSSNSCCDAKFFGELMEELAEVVGCFNSRAEQLVKLHLATGLRGYILRGKRNNHEAMIQEGQLLINYASMNALAVRKILKKYDKVHGSTEGGLFKSRLITLRGELLKSPYLVELGALNINLADAKEGFPTEMESVGEFSCDLESSSPTLTCKLQASATLEFDLSCSVCLEPLFEPVALGCGHLFCNNCACTAASVLGHEGPKTAECDAKCPLCRQAGVYPDAVKLKELGVLIKNRCPEYWKERSQREREQQLKLKKELYDQHLEMLLNMRNSMLRFA

SEQ ID NO: 306 - DNA, 1005 bp, Physcomitella patens
atgaaatttggcaaaacttacaccgagttcatcgagaaggaggccagcgttcaactggcaggctgttcttacgttgagtttaaaaagttgaagaaagtgctcaagaaatgtacaatgcatgacactgccaactccggcgacgatgttgatactttgaccttctctttgtgtcctacgtcttgccctggttgtgatgcaaaattttttgggatcctgatggaggagttggcggaggtggtgggatgcttcaatacccgtgcggagcaattggtcaagctgcacagggcatcaggattgaaaaagtatttgttgggacggaaacgcaacaatcgtaaagccatgattcaggagggccagcttctcattagttatgcctcaatgaatgcgatcgctgttagaaaaatcttgaaaaaatatgacaaggttcacaaatcgagagaagggggtatattaaaaagtcgtttaatggcaatgcgaagcgagcttttgaagtcaccttatttagttgaattgggagcgctgcatctgaaccttgctgatgctaaggaggacacctcgtcagtagcagatctggttggagaattttcgtgcaactttgacagctcatcaccgaccctttcctgcacgctcgtggattctgcaacgctggacttcgacctttcatgccccatatgccttgacacattgtttgaaccagtagctctagggtgtggccatctattctgcaacaattgtgcatgcactgctgccaaagtgttgggacatgaaggtcctcgggccgctcgttgtgatgcacaatgcgccatttgccggcagcccggagtttatcctgatgcggttaaactaaaggagctctctactctgataaagaacagggcttctgaatattggctggagcgattccaccaggaacggaaacagcagctgaagcttacaaaggagttttacgaccagcaactggaaatactgctgggcatgcgggactcaatgatgagcttgcattag

SEQ ID NO: 307 - protein, 334 aa, Physcomitella patens
MKFGKTYTEFIEKEASVQLAGCSYVEFKKLKKVLKKCTMHDTANSGDDVDTLTFSLCPTSCPGCDAKFFGILMEELAEVVGCFNTRAEQLVKLHRASGLKKYLLGRKRNNRKAMIQEGQLLISYASMNAIAVRKILKKYDKVHKSREGGILKSRLMAMRSELLKSPYLVELGALHLNLADAKEDTSSVADLVGEFSCNFDSSSPTLSCTLVDSATLDFDLSCPICLDTLFEPVALGCGHLFCNNCACTAAKVLGHEGPRAARCDAQCAICRQPGVYPDAVKLKELSTLIKNRASEYWLERFHQERKQQLKLTKEFYDQQLEILLGMRDSMMSLH

SEQ ID NO: 308 - DNA, 1068 bp, Picea sitchensis
atgaagtttggggagagattttccgagtatctacacggagaggacgagcattttctggataaatgttcgcacctcgaatacaaacggttgaaaaaggtactgaaaaagtgccgtgttggatacttgcgtgacggaaccgcatcggactttgaaggagggttttactgttcagaaacgacggaaaacgaagacgtgatctgcgggaaaacagccggaggcatttccaagtcaagtgattcattcagcacatgttcttcggaaacttgtgcagtctgtgacagaattttcttctacgagcttacaaaagaagtatcaagtatagttggttgcttcagttcccgtgccagacgtttgttggatctgcatcttgcgtctggttttcaaaggtatctgtggcgtgttaaacacttctttgctgatgatcacgaagcaatgattcgagaaggccggcatttagtcaactatgtggccatgaatgccattgcgattcgaaagattctaaaaaagtatgacaaggtacatagctcagtcaatggccggaacttcaagacaaagttacaggctaaacacatagagctattgaagtcgccttggttaattgaattgattgcgtttcagatcaacacaacagattcagagaatggacatattagtgagatttttcctgaatgttcatgcgactttactgccaatgatccttttattacatgcacattacctgattctgtgaaattggagtttagcctgacatgccctatctgtctggatacagtgtttgatcctgttgcattgggatgtggacacgttttctgcaacagttgtgcgtgcacaggggcatcaataccaacaattgaagggctgaaagcggccaatcaacatgccaggtgcccaatatgcagacagatgggagtttatgctgattctattcatttgcctgagttgggcttgctggtgaagaaaaggtgcaggggctattggaaggaaagattgcatacagaacgggcggagagagtgaaacaagcaaaggaacattgggatctacaatcaagatttgtattaggcttttag

SEQ ID NO: 309 - protein, 355 aa, Picea sitchensis
MKFGERFSEYLHGEDEHFLDKCSHLEYKRLKKVLKKCRVGYLRDGTASDFEGGFYCSETTENEDVICGKTAGGISKSSDSFSTCSSETCAVCDRIFFYELTKEVSSIVGCFSSRARRLLDLHLASGFQRYLWRVKHFFADDHEAMIREGRHLVNYVAMNAIAIRKILKKYDKVHSSVNGRNFKTKLQAKHIELLKSPWLIELIAFQINTTDSENGHISEIFPECSCDFTANDPFITCTLPDSVKLEFSLTCPICLDTVFDPVALGCGHVFCNSCACTGASIPTIEGLKAANQHARCPICRQMGVYADSIHLPELGLLVKKRCRGYWKERLHTERAERVKQAKEHWDLQSRFVLGF

SEQ ID NO: 310 - DNA, 981 bp, Pinus taeda
atggtgtcgggaagaaaatttgcagagtcccgttgggagcttgttaatggggaacaccaacataaccgttttccacggaaatactctcatctcgattacgaccaactcaagaaagctctcgagaagtgcagccacggagaaacgaacgagggacagtctgaagtccgtggggtttgttcagtttgtgaccagaactttttctctgaagtcaccactgaaatatcagctatagttgaccgcttcagttctcgtgccaaacatttattgcatatgcatcttgcatccggttttcacagatacttatggtgcctgagacactgcttcattaatgattatttggcaatggttcaagaaggccagaacctaataaactatgttgccatgaattccattgcaattgggaaaattttggaggaatatgacgaagtgcactgctcagtgaatggccggaactttaggagaatgctgcaggctaaataccttgagctgttgcagtcaccatggctaattgaactgagtgcttttcagattaacacaaaagactcaaagtatgagctgtcctgtgaagatatttgtgaatgttcctatgatttcagcagtggggagcctactattacatgtaaaatgtctgaatctgtgagggcagagttcgacctgacgtgtccaatttgtctggatactgttttttatcccgtagctttaggctgtgggcatattttctgcaatagttgtgcttgtgctgctgcttctgtccccattattgaagatatcaagactgcaaaaccccttgcaaagtgtcccttatgtagacaggcaggagtttttgcagattctgtgcatctagcggaattgaatttgcttttaaagaaaaggtgcaaaagatattggaaagaacggttatatgcagagaaggcagagagaacgaagcaagaaaaagattatcggtctgtgcagactcacttagtcttgggatttatgtaa

SEQ ID NO: 311 - protein, 326 aa, Pinus taeda
MVSGRKFAESRWELVNGEHQHNRFPRKYSHLDYDQLKKALEKCSHGETNEGQSEVRGVCSVCDQNFFSEVTTEISAIVDRFSSRAKHLLHMHLASGFHRYLWCLRHCFINDYLAMVQEGQNLINYVAMNSIAIGKILEEYDEVHCSVNGRNFRRMLQAKYLELLQSPWLIELSAFQINTKDSKYELSCEDICECSYDFSSGEPTITCKMSESVRAEFDLTCPICLDTVFYPVALGCGHIFCNSCACAAASVPIIEDIKTAKPLAKCPLCRQAGVFADSVHLAELNLLLKKRCKRYWKERLYAEKAERTKQEKDYRSVQTHLVLGFM

SEQ ID NO: 312 - DNA, 996 bp, Pinus taeda
atgaagtctggagataaattctcagagtatgtgcagaggtcgcgctttgggaaagaaggttttcaccttgaatacgagcgattgaaagctattctgaaagattgcaagcacatcagacggtctgaggtggatggttgtgatgaacagcgattgcttgcaacgagcgtttcttcctctgaaccatgtccaggttgtgaagaaatatttttgactgaagtaagcctgcaattatcggccattgttggctgcttcacttcacgtgctcgacgtttgcttcgcccccgtatcgtttcaggtttcagaagatatttattgcggcctggacatttctttgtcgattatcgacgacagatgatggaagaggctcagaatttaatcatatacatagctaggaatgccatcgcctctcgtaaattgctgataaaatatgaaaaagtacgttgcaggaacagcaacaacaacttgggctcaaaattgcaggctaagcgaatagaacttttgaaatccccctggttaatcgagttgtgcgcattttacataaatgcttcaagcacaggaggaggggatttgagtgagatatatggtggatgctcgcttagcttcaacattactgaaatgaatgagccttctattacatgttcattgcttaaatcagtgaaccttgattttaatctcacttgcccaatttgtctcgaaacaacctttcagcccgtagctttgggatgtggacatattttttgcaatagctgtgcctgcaacagcgtttctgtacccacaatatcaggtgtaaaggctgcaaataaacgtgcaaagtgccccctctgtagacagatgggtgtcttcgcgaattctgtgcatttaatacaatcgggcttgcttttgaagaaaaggtgcaaggacgtttggaaggaaaggttgaaattcgaaagggcagagagagtaaaggaagcaaaggagcactggaatgagcaatcacgcttgtttttagggttttga

SEQ ID NO: 313 - protein, 331 aa, Pinus taeda
MKSGDKFSEYVQRSRFGKEGFHLEYERLKAILKDCKHIRRSEVDGCDEQRLLATSVSSSEPCPGCEEIFLTEVSLQLSAIVGCFTSRARRLLRPRIVSGFRRYLLRPGHFFVDYRRQMMEEAQNLIIYIARNAIASRKLLIKYEKVRCRNSNNNLGSKLQAKRIELLKSPWLIELCAFYINASSTGGGDLSEIYGGCSLSFNITEMNEPSITCSLLKSVNLDFNLTCPICLETTFQPVALGCGHIFCNSCACNSVSVPTISGVKAANKRAKCPLCRQMGVFANSVHLIQSGLLLKKRCKDVWKERLKFERAERVKEAKEHWNEQSRLFLGF

SEQ ID NO: 314 - DNA, 1074 bp, Pinus taeda
atgaagtttggggagaaatttgccgagtatctacacggagaggatgagcattttctggacaaatgttcgcacctcgaatacaaacggttaaaaaaggtactgaaaaagtgccgcgatggatacttgcatgacggcggcatgggatcggactttgaagcagggctttacagttcacaaacgacggaaaacgaagacgtgatctgcggggaaacagccaaaggcattgccaactcatgtgattcattcagcacatgttcttcggaaacttgtgcagtctgtgatagaattttcttctacgagcttacaaaagaagtatctgctatagttggttgcttcagttcccgtgccagacgtttgttgcatctacatcttgcgtctggttttcaaaggtatctgtggcgagttaaacacttctttgctgatgatcatgaagcaatgattcgagaaggccggcatttagtcagctatgtggccatgaatgccattgcgatccgaaagattctgaaaaagtatgacaaagtccatagctcagtcaatggccggaatttcaagacaaagttacaggctaaacatatagagttattgaagtcaccttggttaattgaattgattgcgtttcagatcaacacaagagattcggagcatggagatattagtgaaatttttcctgaatgctcatgcgactttactgccagtgatcctgttcttacatgcacattgcctgattctgtgaaattggagtttagccttacatgccctatctgtctggatatagtgtttgatcctgttgcattggggtgcggacatattttctgcaaacattgtgcgtgcacaggggcatcaataccaacaattgaaggggtcaaagcggccaatccacgcgccaggtgcccaatatgcagacagatgggggtttatactgattctgttcatttgcctgagttaggcttgttggtgaagaaaagatgcagaggctattggaaggaaagattgcatacagaacgggcagagagagtaaaacaagcaaaggaacattgggatctacaatcacgatttgtattaggctacttatga

SEQ ID NO: 315 - protein, 354 aa, Pinus taeda
MKFGEKFAEYLHGEDEHFLDKCSHLEYKRLKKVLKKCRDGYLHDGGMGSDFEAGLYSSQTTENEDVICGETAKGIANSFSTCSSETCAVCDRIFFYELTKEVSAIVGCFSSRARRLLHLHLASGFQRYLWRVKHFFADDHEAMIREGRHLVSYVAMNAIAIRKILKKYDKVHSSVNGRNFKTKLQAKHIELLKSPWLIELIAFQINTRDSEHGDISEIFPECSCDFTASDPVLTCTLPDSVKLEFSLTCPICLDIVFDPVALGCGHIFCKHCACTGASIPTIEGVKAANPRARCPICRQMGVYTDSVHLPELGLLVKKRCRGYWKERLHTERAERVKQAKEHWDLQSRFVLGYL

SEQ ID NO: 316 - DNA, 963 bp, Populus trichocarpa
atgaagttttgcaagaaatatcaggagtacatgcaaggacagcagaaacaactacccggggttgatttcaaaaagctcaaaaagattttgaagaagtgtaggaaagactttgaatctcaccaggaccatgatggccagtcctgtcctcaccattgtcccgtgtgcgatggtacctttttcccatcccttgtgaaggaaatgtctgcagtagttggttgcttcaataaacgtgcccagaaattacttgagctgcacctggcatctgggtttcgaaaatacttcatgtggttccaaggcaggttacaaaaagaccacgctgccttgattcaagaaggcaaggatctggttacctatgcactgatcaatgctattgcagttcgaaaaatactaaagaaatatgacaagatccattactccaagcaaggacaggccttcaagtcaaaagctcaaagtatgcacattgagatccttcagtccccatggctttgtgagcttatggcttttcacattaatttaagggagacaaaggtcaagccaaacaaggcccctgcattgttcgaggggtgctcgctaacttttgatgatgacaaaccatcactctcttgtgagctttttgactccatcaagcttgatattgatttgacctgttctatatgcttggatactgtatttgatccagtttctctaacatgtggccatatattctgctatatgtgtgcttgttctgctgcttcagtgaccattgtcgatggactcaaggcagcagaacctaaagaaaaatgccctctatgccggaagaccggagtttacgaaggtgccctacacttggaagagcttaatattttattaagcagaagtttccacaagtactgggagcaacgacttcagacggaaaggatagagaggattcggcaggtgaaggagcactgggaatctcagtgtcgagcattcatgggtgtctag

SEQ ID NO: 317 - protein, 320 aa, Populus trichocarpa
MKFCKKYQEYMQGQQKQLPGVDFKKLKKILKKCRKDFESHQDHDGQSCPHHCPVCDGTFFPSLVKEMSAVVGCFNKRAQKLLELHLASGFRKYFMWFQGRLQKDHAALIQEGKDLVTYALINAIAVRKILKKYDKIHYSKQGQAFKSKAQSMHIEILQSPWLCELMAFHINLRETKVKPNKAPALFEGCSLTFDDDKPSLSCELFDSIKLDIDLTCSICLDTVFDPVSLTCGHIFCYMCACSAASVTIVDGLKAAEPKEKCPLCRKTGVYEGALHLEELNILLSRSFHKYWEQRLQTERIERIRQVKEHWESQCRAFMGV

SEQ ID NO: 318 - DNA, 1017 bp, Populus trichocarpa
atgaagtttggagagacattcatggagtatttacacggagaacaagaagggtgtttggacaaatgtgctcatgttgagtacaaacgactcaaaaaagtgttaaagaaatgcagaagccaaggtccaccatccacttcttgcaacgacgagcagctacaagaaagagacagtgaacagaatcatagcttgtctcaattctgccattgccaatcttgccctttgtgtgatcagatgttcttttccgaattgatgagggaagcttcagatatagctgggtgctttagttccagagttagacatctcctccatcttcatgttgccaggggaatgcaaagatataaacttcgtctacgtcaatgtttcataaatgatcagcagatcatggttgaagaagggcgcatgctgattgaatatgttaccatgaatgcaattgctatccgtaaaattctaaagaaatatgataaagtacattgctctataaatgggaagaatttcaaatccaagatgcggtctgaacatatagagcttttgcaatcaccttggctaatagagttgggagccttttatttgaattttgatggaatagatggaggggagtttagtgagttttgcagtcggttttcctgtgatctcagtgctacagaacctgttatgacactgatgcttccaaattatacaaaattagaatacggcctgacttgtgccatttgcttggagatggtttttaatccatatgctttgagttgtggtcatcttttctgcaagttgtgtgcttgcttagctgcttctgtgctgatggttgaaggccttaaatctgcaagttcaaatgcaaagtgccctgtctgtagagaggctggggtatacactaacgcagtgcacatgttggaacttgatctgcttgtgaaaagaaggtgcaaagagcactggaaggagaggatggttgctgaacgtgctgagaccgtaaagcaaaccagggagtattgggatttacagaccaaatatgcgattggctattga

SEQ ID NO: 319 - protein, 338 aa, Populus trichocarpa
MKFGETFMEYLHGEQEGCLDKCAHVEYKRLKKVLKKCRSQGPPSTSCNDEQLQERDSEQNHSLSQFCHCQSCPLCDQMFFSELMREASDIAGCFSSRVRHLLHLHVARGMQRYKLRLRQCFINDQQIMVEEGRMLIEYVTMNAIAIRKILKKYDKVHCSINGKNFKSKMRSEHIELLQSPWLIELGAFYLNFDGIDGGEFSEFCSRFSCDLSATEPVMTLMLPNYTKLEYGLTCAICLEMVFNPYALSCGHLFCKLCACLAASVLMVEGLKSASSNAKCPVCREAGVYTNAVHMLELDLLVKRRCKEHWKERMVAERAETVKQTREYWDLQTKYAIGY

SEQ ID NO: 320 - DNA, 963 bp, Populus trichocarpa
atgaagttttgcaagaaatatcaggagtacatgcaaggcaaggagaatcgactacctgcggttgatttcaaaaagctcaaaaagatattgaagaagtgtagggaagactttgaatcgcaccaggagcatgatggccaatcctgtcctcaccattgttctgtgtgcgatggtacctttttcccttcccttctcaaggaaatgtcagcggtagttggttgcttcaatgaacgagcccagaaattgcttgagctgcacctggtttctggctttcgaaaatacttcatgtggttcaaaggcaagttgcaaaaaaaacatgttgcctttattcaagaaggcaaggatctggttacctatgcactgatcaatgctgttgcagttcgaaaaatactaaagaaatacgacaagatccattactccaagcaaggacagactttcaagtcaaaagctcaaagtatgcacattgagatcctccattccccatggctttgtgagcttatggcttttcacatcaatctaagggaggaaaagatcaagtcaaacaaggtccctgccttattcgaggggtgctcactaaattttgacgatgaaaaaccatcactctcttgtgagctttttgactccgtcaagattgatattgatttgacatgttctatatgcttggatacagtatttgatccagtttcactaacatgtggccatatcttctgccatatgtgtgcttgctctgctgcttcagtgaccattgttgacggactgaaggcagcagagcctaaagaaaaatgccctctttgccggaagactggagtttatgaaggttccctacacttggaagagcttaatattttattaagcagaagttgccatgagtattgggagcagagacttcaaacagaaaggatagagaggattcggcaggtgaaggagcactgggaatctcagtgtcgggcattcgtgggtgtctag

SEQ ID NO: 321 - protein, 320 aa, Populus trichocarpa
MKFCKKYQEYMQGKENRLPAVDFKKLKKILKKCREDFESHQEHDGQSCPHHCSVCDGTFFPSLLKEMSAVVGCFNERAQKLLELHLVSGFRKYFMWFKGKLQKKHVAFIQEGKDLVTYALINAVAVRKILKKYDKIHYSKQGQTFKSKAQSMHIEILHSPWLCELMAFHINLREEKIKSNKVPALFEGCSLNFDDEKPSLSCELFDSVKIDIDLTCSICLDTVFDPVSLTCGHIFCHMCACSAASVTIVDGLKAAEPKEKCPLCRKTGVYEGSLHLEELNILLSRSCHEYWEQRLQTERIERIRQVKEHWESQCRAFVGV

SEQ ID NO: 322 - DNA, 1020 bp, Populus trichocarpa
atgaagtttggagacacgttcatgcagtatttgcaaggagatcaaacagggaatttggttaaatgtgctcatgttgagtacaaaagactcaatgaagtcttaaaaaactgcagaagccaaggttccgcatccgcttcttgcaaaaacgagcagcaaaaggacgaaggaaataatgaattgagttccgggttgtctcaattctgccattgtgaatcttgccctttgtgcgatcaaattttcttttcagaattgatgagggaagcttcacatatagctggatgctttagttctagagttagacatctcctccatcttcatgttgccaggggaatacaaagatacaaactgcgtctacgtcaatgtttcaaaaacgatcagcagaccatggctgaagaagggcgtatgctgattgaatatgttaccatgaacacaattgctattcgtaaaattctaaagaaatacgataaagtgcattgctctgttaatgggaacaatttcaaatccaagatgcaggctgaacatatagagcttttgcaatcgccttggctgatagagttgggagccttttatttgaattttgatggaatagatggaggagagtttagtgagttttgcagtcagttttcctgtgatctcaatggtacagaacctgttatgacactgacacttccaaactctacgaaattagaatacagtctgacatgtgccatttgcttggagacagtttttaatccgtatgctttgagttgtggtcatcttttctgcaagttgtgtgcttgctcagctgcttttgtgctgatgtttgaaggccttaaaactgcaagttcaaatgcaaagtgccccatctgtagagaggccggagtatacactaatgcagtgcacatgttggaacttgatctgctactgaaaagaaggtgcaatgagtactggaaggagaggatggctgctgaacatgctgaggacgaaaaacaaaccagggagtattgggattcacggaccaaatatgccattgggtattga

SEQ ID NO: 323 - protein, 339 aa, Populus trichocarpa
MKFGDTFMQYLQGDQTGNLVKCAHVEYKRLNEVLKNCRSQGSASASCKNEQQKDEGNNELSSGLSQFCHCESCPLCDQIFFSELMREASHIAGCFSSRVRHLLHLHVARGIQRYKLRLRQCFKNDQQTMAEEGRMLIEYVTMNTIAIRKILKKYDKVHCSVNGNNFKSKMQAEHIELLQSPWLIELGAFYLNFDGIDGGEFSEFCSQFSCDLNGTEPVMTLTLPNSTKLEYSLTCAICLETVFNPYALSCGHLFCKLCACSAAFVLMFEGLKTASSNAKCPICREAGVYTNAVHMLELDLLLKRRCNEYWKERMAAEHAEDEKQTREYWDSRTKYAIGY

SEQ ID NO: 324 - DNA, 903 bp, Populus trichocarpa
atgaagtttggagacacgttcatgcagtatttgcaaggagatcaaacagggaatttggttaaatgtgctcatgttgagtacaaaagactcaatgaagtcttaaaaaactgcagaagccaaggttccgcatccgcttcttgcaaaaacgagcagcaaaaggacgaaggaaataatgaattgagttccgggttgtctcaattctgccattgtgaatcttgccctttgtgcgatcaaattttcttttcagaattgatgagggaagcttcacatatagctggatgctttagttctagagttagacatctcctccatcttcatgttgccaggggaatacaaagatacaaactgcgtctacgtcaatgtttcaaaaacgatcagcagaccatggctgaagaagggcgtatgctgattgaatatgttaccatgaacacaattgctattcgtaaaattctaaagaaatacgataaagtgcattgctctgttaatgggaacaatttcaaatccaagatgcaggctgaacatatagagcttttgcaatcgccttggctgatagagttgggagccttttatttgaattttgatggaatagatggaggagagtttagtgagttttgcagtcagttttcctgtgatctcaatggtacagaacctgttatgacactgacacttccaaactctacgaaattagaatacagtctgacatgtgccatttgcttggagacagtttttaatccgtatgctttgagttgtggtcatcttttctgcaagttgtgtgcttgctcagctgcttttgtgctgatgtttgaaggccttaaaactgcaagttcaaatgcaaagtgccccatctgtagagaggtttgtatgtctttaaagcaatttgaggtttataattttctgcactag

SEQ ID NO: 325 - protein, 300 aa, Populus trichocarpa
MKFGDTFMQYLQGDQTGNLVKCAHVEYKRLNEVLKNCRSQGSASASCKNEQQKDEGNNELSSGLSQFCHCESCPLCDQIFFSELMREASHIAGCFSSRVRHLLHLHVARGIQRYKLRLRQCFKNDQQTMAEEGRMLIEYVTMNTIAIRKILKKYDKVHCSVNGNNFKSKMQAEHIELLQSPWLIELGAFYLNFDGIDGGEFSEFCSQFSCDLNGTEPVMTLTLPNSTKLEYSLTCAICLETVFNPYALSCGHLFCKLCACSAAFVLMFEGLKTASSNAKCPICREVCMSLKQFEVYNFLH

SEQ ID NO: 326 - DNA, 978 bp, Sorghum bicolor
atgaagttcggcaagaagtacgaggcgtacatgaggggcatggaggcggagctccccgccgtcgggatcaagcgcctcaagaagatgctcaagacgtgccgccgctcgacttcgccttcgccttcaccttccgccgccgccagcagtgaccgccggtgcactggccattgcactgtgtgtgatgggagtttcttcccgtctcttctgaacgagatgtcagctgtggtcggctgcttcaacgagaaagccaagaagctactcgaactgcacctggcgtcaggattcaagaaatacaccatgtggttcaccaacaagggtggcaagagccacgggagactgacacagcaaggcaaagacttggttacctatgcgattataaatgccgtggccatgaggaagattctcaagaagtatgacaagatacattactcaaagcaagggcaagaattcaaagctcaagctcagagcctccacattgagatacttcagtccccatggctctgtgagctgatggctttctacatgaacttgaggaggagcaagaagaacaatgccgctgcaatggaactctttggcgactgttccctcgtattcgatgacgacagaccaacgctctcatgcaacctctttgactccatgcgtgttgatattagcttgacatgttccatatgcttggatacagtgtttgatccagtctctctttcctgtggccacatattctgctacttatgctgctgttctgctgcatctgtgacaattgtcgatgggctgaagtctgcagatcacaaatcaaaatgtcccctatgccgacagcaaggggtctttcctgacgctatgcacctggatgaactcaacatgctgttgagtcacagttgtccagagtactgggagaagagaatgcaattggagcgagttgaacgtgttcgcctggctaaggagcattgggagtcacagtgcagagcatttttaggcatctaa

SEQ ID NO: 327 - protein, 325 aa, Sorghum bicolor
MKFGKKYEAYMRGMEAELPAVGIKRLKKMLKTCRRSTSPSPSPSAAASSDRRCTGHCTVCDGSFFPSLLNEMSAVVGCFNEKAKKLLELHLASGFKKYTMWFTNKGGKSHGRLTQQGKDLVTYAIINAVAMRKILKKYDKIHYSKQGQEFKAQAQSLHIEILQSPWLCELMAFYMNLRRSKKNNAAAMELFGDCSLVFDDDRPTLSCNLFDSMRVDISLTCSICLDTVFDPVSLSCGHIFCYLCCCSAASVTIVDGLKSADHKSKCPLCRQQGVFPDAMHLDELNMLLSHSCPEYWEKRMQLERVERVRLAKEHWESQCRAFLGI

SEQ ID NO: 328 - DNA, 1029 bp, Selaginella moellendorffii
atgaagtttgggaagagatacactgagtatgtggagaaggaagggcggcgccttctcgaggggtgctcgtatgtggaattcaagcgccacaagaagcttctcaagcgttgcggccgccaagaactcctcaaggcgccatcggccggggatccatcgtctctggcgtgcaattgccctgttgcgtgtccagtctgcgatgggaattttttccccaatttgctcaaggagatctccgccgtggtgggctgtttcaactctcgcgcacagcagctcctggaattccacctctcttccaagttccagaggatgctactgcgcatgaggcacaactttggtggagatcacggcgcgatgatctatcagggaagaaacttggtgaactatgcctcgatgaacgccatcgccattcgcaagattctaaagaagtatgacaaggtgcattgctcggtagctgggcgagcttttagaacacgactccaagccatgcaagtcgagctcctccagtctccatggctgatcgagctaagtgctctctacatcaacctcaaggataaaaaagatggtcagaagggtgaaaatggcgagactagcagtggtgagaacttatcctttcccgagggactgtcacactgctcttgtgaatttggcgattccaaggctactctccagtgcactctcgtcgactcgcagacgtttgaagtggatcttacgtgctccatctgtctggaaacgctgtttgatccagtcgctctgggctgcgggcatctcttttgcaacacctgtgcttgttctgcggcttccattccaacaattcaaggcgtcaagtctgccaccaaggagtccaagtgtccgctttgtcgacagcctggcgtgtacctgaccgcggttttactcacggagttgaacttgatgatcagaaacagatgcagggattactgggacgagagactcaagaaagagcgcgtggagcgcgtccagcaagttaaggagcactgggagaatcaaatgaaagtggtgctcggaatgtaa

SEQ ID NO: 329 - protein, 342 aa, Selaginella moellendorffii
MKFGKRYTEYVEKEGRRLLEGCSYVEFKRHKKLLKRCGRQELLKAPSAGDPSSLACNCPVACPVCDGNFFPNLLKEISAVVGCFNSRAQQLLEFHLSSKFQRMLLRMRHNFGGDHGAMIYQGRNLVNYASMNAIAIRKILKKYDKVHCSVAGRAFRTRLQAMQVELLQSPWLIELSALYINLKDKKDGQKGENGETSSGENLSFPEGLSHCSCEFGDSKATLQCTLVDSQTFEVDLTCSICLETLFDPVALGCGHLFCNTCACSAASIPTIQGVKSATKESKCPLCRQPGVYLTAVLLTELNLMIRNRCRDYWDERLKKERVERVQQVKEHWENQMKVVLGM

SEQ ID NO: 330 - DNA, 1014 bp, Selaginella moellendorffii
atgaagtttgggaagagatacactgagtatgtggagaaggaaggacaccttctcaaggggtgctcgtgcgtggaattcaagcgccacaaaaagactctcaagcattgcgtccgccaagagctcctcaaggcgccaccggccggcgatccatcgtctgtcgcgtgcaatggccccatcgcgtgtccagtctgcgatgggaattttttccccaatttgctcaaggagatttcggccgtggtgggctgtttcaaatcttgcgcacagcagctcctggaattccacctctctcccaagttccagaggatgctactgcgcatgaggcacaactttggcggagatcatgacacgatgatccatcagggaagaaacttggtaaactatgcctcgatgaacgccatggccattcgcaagatactaaagaagtatgacaaggtgcattgctcaatagcagggcaagcttttaaaacacgactgcaatccatgcacgcggagctcctccagtccccatggctgatcgagctaactgctctctacatcaacctcaaggatgaaaaggatggtgagaaaggtgaaaatggcctcaagaacttatcctctcccgagggactggcacactgctcttgtgaatgtggcgattccaaggctactctccagagtacgctcgtcgattcgcaagcgtttgaagcggatcttacatgctcgatctgtctggaaacactgtttgatccagtggctctgggctgcgggcatctcttttgcaatacctgtgcatgttctgcggcctccattccaactattcaaggcgtcaagtctgccaccaaggaggctaagtgtccgctttgtcgacagcccggggtgtacctgagcgcggttttcctgacggagctgaacttgatgatcagaaacagatgcatggattattgggacgaaagactgaagaaagaacgcgtggaacgcgtccagcaagttaaggagcactgggagaatcaaatgaaaatggtgctcggaatgtaa

SEQ ID NO: 331 - protein, 337 aa, Selaginella moellendorffii
MKFGKRYTEYVEKEGHLLKGCSCVEFKRHKKTLKHCVRQELLKAPPAGDPSSVACNGPIACPVCDGNFFPNLLKEISAVVGCFKSCAQQLLEFHLSPKFQRMLLRMRHNFGGDHDTMIHQGRNLVNYASMNAMAIRKILKKYDKVHCSIAGQAFKTRLQSMHAELLQSPWLIELTALYINLKDEKDGEKGENGLKNLSSPEGLAHCSCECGDSKATLQSTLVDSQAFEADLTCSICLETLFDPVALGCGHLFCNTCACSAASIPTIQGVKSATKEAKCPLCRQPGVYLSAVFLTELNLMIRNRCMDYWDERLKKERVERVQQVKEHWENQMKMVLGM

SEQ ID NO: 332 - DNA, 999 bp, Vitis vinifera
atgaagtttggagagactttcatggagtatttacatggagagcaggagtcgtttctggataaattctctcacgttgagtacaagcggctgaagaaggtgctgaagacttgcaggtccttgcacggctcctacggtgctgatgagcaagaagatgagaatagtgacgccctgtctcggctgtgtcggtatgaatcttgcccattgtgtgataagattttcttttctgaattaatgaaggaggcatcagatatcgctggatgctttagttctagagttagacacctcctccaccttcatattgctaccggaatgcagagatatgtgttgctcttgcgacaatgtttcaaaaatgataggcaaacaattgcagaggaaggccggatgttgatcgactatgttacaatgaatgcaattgcaatccggaaaatccttaagaaatatgataaagttcatagctctgtcaatggcagggatttcaaacggaagatgcaggcaaaacatattgaacttttgcaatcaccttggctgatagaattaggggctttttatttgaattttaatgagtcagatgaggaggagtcctgtaagatttcctgtcaattttcctgtgatctcagcaccactgaacctgtaatgacattgaggcttccagattccatgaagctggagtgtaatctgacttgttctatttgcttggatactctttttaacccacatgctttgagttgcggtcatctcttttgcaagtcttgtgcttgttcagctgcttcagtgatgatcttccaaggcctcaaggctgcaagtccagagtcaaagtgtcctatctgcagagaggctggagtatattctaatgcagtggaaatgctagaacttgatttgctcttgaaaagaagatgcagagagtactggaaagagaggctaattgctgaacgtgctgagatggtgaagcaagccaaggactactgggattcacaaacaaagtatgtgattggatattga

SEQ ID NO: 333 - protein, 332 aa, Vitis vinifera
MKFGETFMEYLHGEQESFLDKFSHVEYKRLKKVLKTCRSLHGSYGADEQEDENSDALSRLCRYESCPLCDKIFFSELMKEASDIAGCFSSRVRHLLHLHIATGMQRYVLLLRQCFKNDRQTIAEEGRMLIDYVTMNAIAIRKILKKYDKVHSSVNGRDFKRKMQAKHIELLQSPWLIELGAFYLNFNESDEEESCKISCQFSCDLSTTEPVMTLRLPDSMKLECNLTCSICLDTLFNPHALSCGHLFCKSCACSAASVMIFQGLKAASPESKCPICREAGVYSNAVEMLELDLLLKRRCREYWKERLIAERAEMVKQAKDYWDSQTKYVIGY

SEQ ID NO: 334 - DNA, 975 bp, Vitis vinifera
atgaagttttgcaagaaatatcaggagtacatgcaggcccaggagaagaaacttcctggggttgggttcaagaagctcaagaagattttgaagaggtgtaggagagaccttcaaatccagaaaggcctcgagggtgttgttgatatccccacttgcccccaccattgccaagtttgtgatggaaccttcttcccttcacttctcaaggaaatgtctgaaatagtaggctgcttcaatgagcgagcacagaaattgctggatctgcatttggcatcgggtgttaggaagtactacatatggttcaaagggaagctgcaaggaaaccatgttgccttaattcaagaaggcaaagacctggtcacttatgcaatgatcaatgccactgcaattcgaaaaatactaaagaagtatgataaagttcattactctaagcaagggcaggcattcaagtcacaagctcaaagcatgcatatggagatccttcagtccccttggctatgtgaacttatggcttttcatatcaatttacgggaatccaaagccaagtcgagaaaggcccctgccttgtttgatggatgctccctcacattcaacgatggcaaaccatcactctcttgtgaactctttgattcagtcaagctcgatattgacttgacttgttctatatgcttggacacagtctttgacccagtatctctcacgtgtggccatatcttctgctacatgtgtgcttgctctgctgcatcagtgactattgtggatggattgaagatagccgaacctaaagaaaaatgcccactctgtcgagaggcaggagtttatgaaggtgctgtacatttggaggagttaaacattctattaagtcggagctgccatgaatattgggagcagaggcttcaaacagagagaacagagaggattcgacaagcaaaggagcactgggaatcccaatgtcgagcattcatgggtgtctga

SEQ ID NO: 335 - protein, 324 aa, Vitis vinifera
MKFCKKYQEYMQAQEKKLPGVGFKKLKKILKRCRRDLQIQKGLEGVVDIPTCPHHCQVCDGTFFPSLLKEMSEIVGCFNERAQKLLDLHLASGVRKYYIWFKGKLQGNHVALIQEGKDLVTYAMINATAIRKILKKYDKVHYSKQGQAFKSQAQSMHMEILQSPWLCELMAFHINLRESKAKSRKAPALFDGCSLTFNDGKPSLSCELFDSVKLDIDLTCSICLDTVFDPVSLTCGHIFCYMCACSAASVTIVDGLKIAEPKEKCPLCREAGVYEGAVHLEELNILLSRSCHEYWEQRLQTERTERIRQAKEHWESQCRAFMGV

SEQ ID NO: 336 - DNA, 1098 bp, Zea mays
atggagtgcctaacctcctcaacgttgtatggctatagttcattatcatttctttttccagcagacaagatgaagttcggcgccacatatgaggagtatctccgggcagagcgggacaaattcctagggcaatgctcccatgtagaatacaaacgcctcaaaaaggtattgaagaaatgtagagttggtcgctcactgcaagcagatggcacaaatggtgatgagcagcaggaggggagagacgaatcttcaaacatttgtgaatgcaactcatgcacattgtgtgatgagatgttctttacagaactcaacaaggaagcatcagaaatagcaggttgtttcagatctagagtacaacgtctcctccatcttcatgttccttcaggactacaacgctgtatatggcgttttaggcagtgtttcatagatgatcagcaaataatggttcaagaaggcagaatgcttctcaattatgtgaccatgaatgctattgctattcgcaaaattctcaagaaatatgacaagatacatggttctgtgagtggcagagatttcaagagcaagatgcaaactgagcatattgaactgttgcagtcaccttggctgatagagcttgctgctttccatcttaactgcgatgattcagatgctgatgaacctagagctggagagttcttcaagaatggattcttcaagaatttttcctgtgacctgagtggagcacagccactactaacaatgaccatttctgaaactctgaagtatgagtacagcctaacttgtccaatttgcttggacactttgttcaacccttatgcgcttagctgtgggcatctgttctgcaaagcctgtgcatgtggtgctgcttctgtctacatcttccagggtgtcaagtcggcacctccggaggccaagtgccctgtctgccgagcggttggtgtgtttgatcgtgctgtgcgtatgactgaactagaattgctcctcaagagaagggacaaagattactttctgcagagactgcgcgaagagcgaagtgtgatggtgaagcaggccaaagaatactgggactcacaggcaatgctatcgatggggatttga

SEQ ID NO: 337 - protein, 365 aa, Zea mays
MECLTSSTLYGYSSLSFLFPADKMKFGATYEEYLRAERDKFLGQCSHVEYKRLKKVLKKCRVGRSLQADGTNGDEQQEGRDESSNICECNSCTLCDEMFFTELNKEASEIAGCFRSRVQRLLHLHVPSGLQRCIWRFRQCFIDDQQIMVQEGRMLLNYVTMNAIAIRKILKKYDKIHGSVSGRDFKSKMQTEHIELLQSPWLIELAAFHLNCDDSDADEPRAGEFFKNGFFKNFSCDLSGAQPLLTMTISETLKYEYSLTCPICLDTLFNPYALSCGHLFCKACACGAASVYIFQGVKSAPPEAKCPVCRAVGVFDRAVRMTELELLLKRRDKDYFLQRLREERSVMVKQAKEYWDSQAMLSMGI

SEQ ID NO: 338 - DNA, 1029 bp, Zea mays
taattgattgacgcttgccaggaactaaaatatgtaattagccagagaaccttcagatgtaattagccacaacaattgaattggtaagaacattgtagctttcaaatccccatcgatagcattgcctgtgagtcccagtattctttggcctgcttcaccatcacacttcgctcttcgcgcagtctctgcagaaagtaatctttgtcccttctcttgaggagcaattctagttcagtcatacgcacagcatgatcaaacacaccaaccgctcggcagacagggcacttggcctccggaggtgccgacttgacaccctggaagatgtagacagaagcagcaccacatgcacaggctttgcagaacagatgcccacagctaagtgcataagggttgaacaaagtgtccaagcaaatcggacaagttaggctgtactcatacttcagagtttcagaaatggtcattgttagtagtggctgtgctccactcaggtcacaggaaaaattcttgaagaatccattcttgaagaactctccagctctaggttcatcagcatctgaatcatcgcagttaagatggaaagcagcaagctctatcagccaaggtgactgcaacagttcaatatgctcagtttgcatcttgctcttgaaatctctgccactcacagaaccatgtatcttgtcatatttcttgagaattttgcgaatagcaatagcattcatggtcacataattgagaagcattctgccttcttgaaccattatttgctgatcatctatgaaacactgcctaaaacgccatatacagcgttgtagtcctgaaggaacatgaagatggaggagacgttgtactctagatctgaaacaacctgctatttctgatgcttccttgttgagttctgtaaagaacatctcatcacacaatgtgcatgagttgcattcacaaatgtttgaagattcgtctctcccctcctgctgctcatcaccatttgtgccatctgcttgcagtgagcgaccaactctacatttcttc

SEQ ID NO: 339 - protein, 342 aa, Zea mays
MKFGATYEEYLRAERDKFLGQCSHVEYKRLKKVLKKCRVGRSLQADGTNGDEQQEGRDESSNICECNSCTLCDEMFFTELNKEASEIAGCFRSRVQRLLHLHVPSGLQRCIWRFRQCFIDDQQIMVQEGRMLLNYVTMNAIAIRKILKKYDKIHGSVSGRDFKSKMQTEHIELLQSPWLIELAAFHLNCDDSDADEPRAGEFFKNGFFKNFSCDLSGAQPLLTMTISETLKYEYSLTCPICLDTLFNPYALSCGHLFCKACACGAASVYIFQGVKSAPPEAKCPVCRAVGVFDHAVRMTELELLLKRRDKDYFLQRLREERSVMVKQAKEYWDSQAMLSMGI

SEQ ID NO: 340 - protein, 70 aa, Oryza sativa
GKDLVTYAIINAVAMRKILKKYDKIHYLKQGQEFKAQAQSLHIEILQSPWLCELMAFYMNLRRSKKNNGA

SEQ ID NO: 341 - protein, 70 aa, Arabidopsis thaliana
GKDLVNYALINAVAIRKILKKYDKIHESRQGQAFKTQVQKMRIEILQSPWLCELMAFHINLKESKKESGA

SEQ ID NO: 342 - protein, 70 aa, Arabidopsis thaliana; identical to SEQ ID NO: 341

SEQ ID NO: 343 - protein, 70 aa, Arabidopsis thaliana
GQILIQYITMNAIAIRKILKKYDKVHSSENGKNFKLKMRAERIELLHSPWLIELGAFYLNSGLDNVGNFK

SEQ ID NO: 344 - protein, 70 aa, Arabidopsis thaliana; identical to SEQ ID NO: 343

SEQ ID NO: 345 - protein, 70 aa, Arabidopsis thaliana; identical to SEQ ID NO: 343

SEQ ID NO: 346 - protein, 70 aa, Centaurea solstitialis
GENLVGYAIINAIAMRKILKKYDKIHDSKQGQAFKSQVKSMHMEILQSPWLCELIAFHINLSETKVDMRK

SEQ ID NO: 347 - protein, 70 aa, Oryza sativa
GKDLVTYAIINAVAMRKILKKYDKIHYSKQGQEFKAQAQSLHIEILQSPWLCELMAFYMNLRRSKKNNGA

SEQ ID NO: 348 - protein, 70 aa, Oryza sativa
GRMLLNYVTMNAIAIRKILKKYDKIHGSVSGRDFKSKMQTDHIELLQSPWLIELGAFHLNCNSSDIDETV

SEQ ID NO: 349 - protein, 70 aa, Medicago truncatula
GRDLVTYALINAVAIRKILKKYDKIHYSKQGQLFKSQAQTMHKEILQSPWLIELMALHINLRETKDKPRK

SEQ ID NO: 350 - protein, 70 aa, Populus trichocarpa
GKDLVTYALINAIAVRKILKKYDKIHYSKQGQAFKSKAQSMHIEILQSPWLCELMAFHINLRETKVKPNK

SEQ ID NO: 351 - protein, 70 aa, Glycine max
GRILIEYIAMNAIAMRKILKKYDKVHSSVNGENFKSRMHAEHIEILHSPWLIELGAFYLNSSGLDSCDLD

SEQ ID NO: 352 - protein, 70 aa, Glycine max
GKDLVTYALINAIAIRKILKKYDKIHYSKQGQLFKSQIQSMHKEILQSPWLCELMAFHINLRETKVKSRK

SEQ ID NO: 353 - protein, 70 aa, Glycine max
GKDLVTYALINAIAIRKILKKYDKIHYSKQGQLFKSQVQSMHKEILQSPWLCELMAFHINLRETKVKSRK

SEQ ID NO: 354 - protein, 70 aa, Hordeum vulgare
GRLLINYVTMNAIAIRKILKKYDKVHGSVSGRDFRSKMQTEHTELLQSPWLIELGAFHLNCDSSDIDEPV

SEQ ID NO: 355 - protein, 70 aa, Medicago truncatula; identical to SEQ ID NO: 349

SEQ ID NO: 356 - protein, 70 aa, Oryza sativa; identical to SEQ ID NO: 348

SEQ ID NO: 357 - protein, 70 aa, Physcomitella patens
GQLLINYASMNALAVRKILKKYDKVHGSTEGGLFKSRLITLRGELLKSPYLVELGALNINLADAKEGFPT

SEQ ID NO: 358 - protein, 70 aa, Physcomitella patens
GQLLISYASMNAIAVRKILKKYDKVHKSREGGILKSRLMAMRSELLKSPYLVELGALHLNLADAKEDTSS

SEQ ID NO: 359 - protein, 70 aa, Picea sitchensis
GRHLVNYVAMNAIAIRKILKKYDKVHSSVNGRNFKTKLQAKHIELLKSPWLIELIAFQINTTDSENGHIS

SEQ ID NO: 360 - protein, 70 aa, Pinus taeda
GQNLINYVAMNSIAIGKILEEYDEVHCSVNGRNFRRMLQAKYLELLQSPWLIELSAFQINTKDSKYELSC

SEQ ID NO: 361 - protein, 70 aa, Pinus taeda
AQNLIIYIARNAIASRKLLIKYEKVRCRNSNNNLGSKLQAKRIELLKSPWLIELCAFYINASSTGGGDLS

SEQ ID NO: 362 - protein, 70 aa, Pinus taeda
GRHLVSYVAMNAIAIRKILKKYDKVHSSVNGRNFKTKLQAKHIELLKSPWLIELIAFQINTRDSEHGDIS

SEQ ID NO: 363 - protein, 70 aa, Populus trichocarpa; identical to SEQ ID NO: 350

SEQ ID NO: 364 - protein, 70 aa, Populus trichocarpa
GRMLIEYVTMNAIAIRKILKKYDKVHCSINGKNFKSKMRSEHIELLQSPWLIELGAFYLNFDGIDGGEFS

SEQ ID NO: 365 - protein, 70 aa, Populus trichocarpa
GKDLVTYALINAVAVRKILKKYDKIHYSKQGQTFKSKAQSMHIEILHSPWLCELMAFHINLREEKIKSNK

SEQ ID NO: 366 - protein, 70 aa, Populus trichocarpa
GRMLIEYVTMNTIAIRKILKKYDKVHCSVNGNNFKSKMQAEHIELLQSPWLIELGAFYLNFDGIDGGEFS

SEQ ID NO: 367 - protein, 70 aa, Populus trichocarpa; identical to SEQ ID NO: 366

SEQ ID NO: 368 - protein, 70 aa, Sorghum bicolor
GKDLVTYAIINAVAMRKILKKYDKIHYSKQGQEFKAQAQSLHIEILQSPWLCELMAFYMNLRRSKKNNAA

SEQ ID NO: 369 - protein, 70 aa, Selaginella moellendorffii
GRNLVNYASMNAIAIRKILKKYDKVHCSVAGRAFRTRLQAMQVELLQSPWLIELSALYINLKDKKDGQKG

SEQ ID NO: 370 - protein, 70 aa, Selaginella moellendorffii
GRNLVNYASMNAMAIRKILKKYDKVHCSIAGQAFKTRLQSMHAELLQSPWLIELTALYINLKDEKDGEKG

SEQ ID NO: 371 - protein, 70 aa, Vitis vinifera
GRMLIDYVTMNAIAIRKILKKYDKVHSSVNGRDFKRKMQAKHIELLQSPWLIELGAFYLNFNESDEEESC

SEQ ID NO: 372 - protein, 70 aa, Vitis vinifera
GKDLVTYAMINATAIRKILKKYDKVHYSKQGQAFKSQAQSMHMEILQSPWLCELMAFHINLRESKAKSRK

SEQ ID NO: 373 - protein, 70 aa, Zea mays
GRMLLNYVTMNAIAIRKILKKYDKIHGSVSGRDFKSKMQTEHIELLQSPWLIELAAFHLNCDDSDADEPR

SEQ ID NO: 374 - protein, 70 aa, Zea mays; identical to SEQ ID NO: 373

SEQ ID NO: 375 - protein, 50 aa, Oryza sativa
TCSICLDTVFDPVALSCGHIYCYLCSCSAASVTIVDGLKSAERKSKCPLC

SEQ ID NO: 376 - protein, 50 aa, Arabidopsis thaliana
TCSICLDTVFDPISLTCGHIYCYMCACSAASVNVVDGLKTAEATEKCPLC

SEQ ID NO: 377 - protein, 50 aa, Arabidopsis thaliana; identical to SEQ ID NO: 376

SEQ ID NO: 378 - protein, 50 aa, Arabidopsis thaliana
TCAICLETVFNPYALKCGHIFCNSCACSAASVLIFQGIKAAPRHSKCPIC

SEQ ID NO: 379 - protein, 50 aa, Arabidopsis thaliana; identical to SEQ ID NO: 378

SEQ ID NO: 380 - protein, 50 aa, Arabidopsis thaliana; identical to SEQ ID NO: 378

SEQ ID NO: 381 - protein, 50 aa, Centaurea solstitialis
TCSVCLDTVFDPVYLTCGHIFCFMCACKSGSVTIVDGLKATKPTAKCPLC

SEQ ID NO: 382 - protein, 50 aa, Oryza sativa; identical to SEQ ID NO: 375

SEQ ID NO: 383 - protein, 50 aa, Oryza sativa
TCPICLDTLFNPYALSCGHLFCKGCACGAASVYIFQGVKSAPPEAKCPVC

SEQ ID NO: 384 - protein, 50 aa, Medicago truncatula
TCSICLDTVFDPVSLTCGHIFCYSCACSAASVTIVDGLKETHSKEKCPMC

SEQ ID NO: 385 - protein, 50 aa, Populus trichocarpa
TCSICLDTVFDPVSLTCGHIFCYMCACSAASVTIVDGLKAAEPKEKCPLC

SEQ ID NO: 386 - protein, 50 aa, Glycine max
TCAICLDFVFNPYALSCGHIFCKSCACSAASVMIFQGLKAASPESKCPIC

SEQ ID NO: 387 - protein, 50 aa, Glycine max
TCSICLDTVFDPVSLTCGHIFCYICACSAASVSIVNGLKSADPKMKCPLC

SEQ ID NO: 388 - protein, 50 aa, Glycine max; identical to SEQ ID NO: 387

SEQ ID NO: 389 - protein, 50 aa, Hordeum vulgare
TCPICLDTIFNPYALSCGHLFCKGCACGAASVYIFQGVRSAPPEAKCPVC

SEQ ID NO: 390 - protein, 50 aa, Medicago truncatula; identical to SEQ ID NO: 384

SEQ ID NO: 391 - protein, 50 aa, Oryza sativa; identical to SEQ ID NO: 383

SEQ ID NO: 392 - protein, 50 aa, Physcomitella patens
SCSVCLEPLFEPVALGCGHLFCNNCACTAASVLGHEGPKTAECDAKCPLC

SEQ ID NO: 393 - protein, 50 aa, Physcomitella patens
SCPICLDTLFEPVALGCGHLFCNNCACTAAKVLGHEGPRAARCDAQCAIC

SEQ ID NO: 394 - protein, 50 aa, Picea sitchensis
TCPICLDTVFDPVALGCGHVFCNSCACTGASIPTIEGLKAANQHARCPIC

SEQ ID NO: 395 - protein, 50 aa, Pinus taeda
TCPICLDTVFYPVALGCGHIFCNSCACAAASVPIIEDIKTAKPLAKCPLC

SEQ ID NO: 396 - protein, 50 aa, Pinus taeda
TCPICLETTFQPVALGCGHIFCNSCACNSVSVPTISGVKAANKRAKCPLC

SEQ ID NO: 397 - protein, 50 aa, Pinus taeda
TCPICLDIVFDPVALGCGHIFCKHCACTGASIPTIEGVKAANPRARCPIC

SEQ ID NO: 398 - protein, 50 aa, Populus trichocarpa; identical to SEQ ID NO: 385

SEQ ID NO: 399 - protein, 50 aa, Populus trichocarpa
TCAICLEMVFNPYALSCGHLFCKLCACLAASVLMVEGLKSASSNAKCPVC

SEQ ID NO: 400 - protein, 50 aa, Populus trichocarpa
TCSICLDTVFDPVSLTCGHIFCHMCACSAASVTIVDGLKAAEPKEKCPLC

SEQ ID NO: 401 - protein, 50 aa, Populus trichocarpa
TCAICLETVFNPYALSCGHLFCKLCACSAAFVLMFEGLKTASSNAKCPIC

SEQ ID NO: 402 - protein, 50 aa, Populus trichocarpa; identical to SEQ ID NO: 401

SEQ ID NO: 403 - protein, 50 aa, Sorghum bicolor
TCSICLDTVFDPVSLSCGHIFCYLCCCSAASVTIVDGLKSADHKSKCPLC

SEQ ID NO: 404 - protein, 50 aa, Selaginella moellendorffii
TCSICLETLFDPVALGCGHLFCNTCACSAASIPTIQGVKSATKESKCPLC

SEQ ID NO: 405 - protein, 50 aa, Selaginella moellendorffii
TCSICLETLFDPVALGCGHLFCNTCACSAASIPTIQGVKSATKEAKCPLC

SEQ ID NO: 406 - protein, 50 aa, Vitis vinifera
TCSICLDTLFNPHALSCGHLFCKSCACSAASVMIFQGLKAASPESKCPIC

SEQ ID NO: 407 - protein, 50 aa, Vitis vinifera
TCSICLDTVFDPVSLTCGHIFCYMCACSAASVTIVDGLKIAEPKEKCPLC

SEQ ID NO: 408 - protein, 50 aa, Zea mays
TCPICLDTLFNPYALSCGHLFCKACACGAASVYIFQGVKSAPPEAKCPVC

SEQ ID NO: 409 - protein, 50 aa, Zea mays; identical to SEQ ID NO: 408

SEQ ID NO: 410 - protein, 42 aa, Oryza sativa
CSVCDGSFFPSLLNEMSAVIGCFNEKAKKLLELHLASGFKKY

SEQ ID NO: 411 - protein, 42 aa, Arabidopsis thaliana
CPVCDGTFFPELLKEMEDVVGWFNEHAQKLLELHLASGFTKC

SEQ ID NO: 412 - protein, 42 aa, Arabidopsis thaliana; identical to SEQ ID NO: 411

SEQ ID NO: 413 - protein, 42 aa, Arabidopsis thaliana
CPWCDQMFFEELMKEATDIAGFFRSRVRHLLHLHVATGMQRY

SEQ ID NO: 414 - protein, 42 aa, Arabidopsis thaliana; identical to SEQ ID NO: 413

SEQ ID NO: 415 - protein, 42 aa, Arabidopsis thaliana; identical to SEQ ID NO: 413

SEQ ID NO: 416 - protein, 42 aa, Centaurea solstitialis
CPVCDGSFFPSLMKEMSMVVGCFNKRAQKVLNVHLATGFRKY

SEQ ID NO: 417 - protein, 42 aa, Oryza sativa; identical to SEQ ID NO: 410

SEQ ID NO: 418 - protein, 42 aa, Oryza sativa
CTLCDQMFFTELTKEASEIAGCFSSRVQRLLNLHVPSGFLRY

SEQ ID NO: 419 - protein, 42 aa, Medicago truncatula
CPLCDGTFFPSLLNEMSEIVGCFNQRAQKLLERHLASGFQKY

SEQ ID NO: 420 - protein, 42 aa, Populus trichocarpa
CPVCDGTFFPSLVKEMSAVVGCFNKRAQKLLELHLASGFRKY

SEQ ID NO: 421 - protein, 42 aa, Glycine max
CPLCDQQFFSELMKEASDVVGYFSSRVKNLLHLHIATGMQRY

SEQ ID NO: 422 - protein, 42 aa, Glycine max
CPVCDGTFFPSLLNEMSDIVGCFNQRAQKLLELHLASGVRKY

SEQ ID NO: 423 - protein, 42 aa, Glycine max; identical to SEQ ID NO: 422

SEQ ID NO: 424 - protein, 42 aa, Hordeum vulgare
CTLCDQMFFTELTKEASDIAGYFSTRVQHLLNLHVPSGLQRY

SEQ ID NO: 425 - protein, 42 aa, Medicago truncatula; identical to SEQ ID NO: 419

SEQ ID NO: 426 - protein, 42 aa, Oryza sativa; identical to SEQ ID NO: 418

SEQ ID NO: 427 - protein, 42 aa, Physcomitella patens
NSCCDAKFFGELMEELAEVVGCFNSRAEQLVKLHLATGLRGY

SEQ ID NO: 428 - protein, 42 aa, Physcomitella patens
CPGCDAKFFGILMEELAEVVGCFNTRAEQLVKLHRASGLKKY

SEQ ID NO: 429 - protein, 42 aa, Picea sitchensis
CAVCDRIFFYELTKEVSSIVGCFSSRARRLLDLHLASGFQRY

SEQ ID NO: 430 - protein, 42 aa, Pinus taeda
CSVCDQNFFSEVTTEISAIVDRFSSRAKHLLHMHLASGFHRY

SEQ ID NO: 431 - protein, 42 aa, Pinus taeda
CPGCEEIFLTEVSLQLSAIVGCFTSRARRLLRPRIVSGFRRY

SEQ ID NO: 432 - protein, 42 aa, Pinus taeda
CAVCDRIFFYELTKEVSAIVGCFSSRARRLLHLHLASGFQRY

SEQ ID NO: 433 - protein, 42 aa, Populus trichocarpa; identical to SEQ ID NO: 420

SEQ ID NO: 434 - protein, 42 aa, Populus trichocarpa
CPLCDQMFFSELMREASDIAGCFSSRVRHLLHLHVARGMQRY

SEQ ID NO: 435 - protein, 42 aa, Populus trichocarpa
CSVCDGTFFPSLLKEMSAVVGCFNERAQKLLELHLVSGFRKY

SEQ ID NO: 436 - protein, 42 aa, Populus trichocarpa
CPLCDQIFFSELMREASHIAGCFSSRVRHLLHLHVARGIQRY

SEQ ID NO: 437 - protein, 42 aa, Populus trichocarpa; identical to SEQ ID NO: 436

SEQ ID NO: 438 - protein, 42 aa, Sorghum bicolor
CTVCDGSFFPSLLNEMSAVVGCFNEKAKKLLELHLASGFKKY

SEQ ID NO: 439 - protein, 42 aa, Selaginella moellendorffii
CPVCDGNFFPNLLKEISAVVGCFNSRAQQLLEFHLSSKFQRM

SEQ ID NO: 440 - protein, 42 aa, Selaginella moellendorffii
CPVCDGNFFPNLLKEISAVVGCFKSCAQQLLEFHLSPKFQRM

SEQ ID NO: 441 - protein, 42 aa, Vitis vinifera
CPLCDKIFFSELMKEASDIAGCFSSRVRHLLHLHIATGMQRY

SEQ ID NO: 442 - protein, 42 aa, Vitis vinifera
CQVCDGTFFPSLLKEMSEIVGCFNERAQKLLDLHLASGVRKY

SEQ ID NO: 443 - protein, 42 aa, Zea mays
CTLCDEMFFTELNKEASEIAGCFRSRVQRLLHLHVPSGLQRC

SEQ ID NO: 444 - protein, 42 aa, Zea mays; identical to SEQ ID NO: 443

SEQ ID NO: 445 - DNA, 56 bp, Artificial sequence
  primer 1
ggggacaagtttgtacaaaaaagcaggcttaaacaatgaagtttgccaagaagtac

SEQ ID NO: 446 - DNA, 50 bp, Artificial sequence
  primer 2
ggggaccactttgtacaagaaagctgggtaaaaatccaccaactttagaa

SEQ ID NO: 447 - DNA, 2194 bp, Oryza sativa; identical to SEQ ID NO: 43
